(19) United States
(12) Patent Application Publication
(10) Pub. No.: US 2025/0352638 A1
(43) Pub. Date: Nov. 20, 2025

(54) CORONAVIRUS IMMUNOGEN COMPOSITIONS AND THEIR USES

(71) Applicant: Flagship Pioneering Innovations VI, LLC, Cambridge, MA (US)

(72) Inventors: Avak KAHVEJIAN, Lexington, MA (US); Alexandra Sophie DE BOER, Somerville, MA (US); Yann Paul Guy Régis ECHELARD, Jamaica Plain, MA (US); Jennifer A. NELSON, Brookline, MA (US); Soohyun LEE, Belmont, MA (US); Michael Donato MELFI, Somerville, MA (US); Mohammad Mubeen MOSAHEB, Watertown, MA (US); Alla Alexeevna SIGOVA, Newton, MA (US)

(21) Appl. No.: 18/712,356

(22) PCT Filed: Nov. 23, 2022
(86) PCT No.: PCT/US2022/050893

§ 371 Date: May 22, 2024

Related U.S. Application Data
(60) Provisional application No. 63/283,146, filed on Nov. 24, 2021.

(51) Int. Cl. A61K 39/215; A61K 39/00; A61P 31/14; C07K 14/005

(52) U.S. Cl. CPC A61K 39/215; A61P 31/14; C07K 14/005; A61K 2039/53; A61K 2039/55516; A61K 2039/572; A61K 2039/70; C12N 2760/16122; C12N 2760/16134; C12N 2770/20022; C12N 2770/20034

(57) ABSTRACT

The disclosure provides compositions and methods comprising circular polyribonucleotides comprising a sequence encoding a coronavirus immunogen, and compositions and methods comprising linear polyribonucleotides comprising a sequence encoding one or more coronavirus immunogens. Compositions and methods are provided that are related to generating polyclonal antibodies, for example, using the disclosed circular polyribonucleotides or the disclosed linear polyribonucleotides.

### SEQUENCE LISTING

[0001] The instant application contains a Sequence Listing which has been submitted electronically in XML format and is hereby incorporated by reference in its entirety. Said XML copy, created on Nov. 26, 2024, is named “51509-063002_Sequence_Listing_11_26_24.xml” and is 833,590 bytes in size.

### BACKGROUND

[0002] COVID-19, a respiratory disease in humans caused by an infection of SARS-CoV-2, emerged in Wuhan, China, and spread worldwide, leading to the World Health Organization declaring a pandemic on Mar. 11, 2020, and resulting in millions of deaths worldwide. Therefore, there is an urgent need for vaccines and therapeutics that are active against coronaviruses and uses thereof.

### SUMMARY

[0003] The disclosure generally relates to circular polyribonucleotides comprising a sequence encoding a coronavirus immunogen and to immunogenic compositions comprising the circular polyribonucleotide. This disclosure further relates to methods of using circular polyribonucleotides comprising a sequence encoding a coronavirus immunogen and the immunogenic composition. In some embodiments, the circular polyribonucleotides and immunogenic compositions of this disclosure are used in methods of generating polyclonal antibodies. The produced polyclonal antibodies can be used in methods of prophylaxis in subjects (e.g., human subjects) or methods of treatment for subjects (e.g., human subjects) having a coronavirus infection. The produced polyclonal antibodies can be administered to subjects at high risk for exposure to coronavirus infection.

[0004] In a first aspect, the disclosure provides a circular polyribonucleotide including an open reading frame encoding a coronavirus immunogen, wherein the coronavirus immunogen includes an amino acid sequence having at least 85% sequence identity (e.g., at least 85%, 86%, 87%, 88%, 89%, 90%, 91%, 92%, 93%, 94%, 95%, 96%, 97%, 98%, 99% or 100% sequence identity) with the amino acid sequence of any one of SEQ ID NOs: 63-111 and 283-291. In some embodiments, the coronavirus immunogen includes an amino acid sequence having at least 90% (e.g., at least 90%, 91%, 92%, 93%, 94%, 95%, 96%, 97%, 98%, 99% or 100% sequence identity) sequence identity with the amino acid sequence of any one of SEQ ID NOs: 63-111 and 283-291. In some embodiments, the coronavirus immunogen includes an amino acid sequence having at least 95% (e.g., at least 95%, 96%, 97%, 98%, 99% or 100% sequence identity) sequence identity with the amino acid sequence of any one of SEQ ID NOs: 63-111 and 283-291. In some embodiments, the coronavirus immunogen includes an amino acid sequence of any one of SEQ ID NOs: 63-111 and 283-291.

[0005] In certain embodiments, the coronavirus immunogen is a RBD immunogen having at least 85% (e.g., at least 85%, 86%, 87%, 88%, 89%, 90%, 91%, 92%, 93%, 94%, 95%, 96%, 97%, 98%, 99% or 100% sequence identity) identity with the amino acid sequence of any one of SEQ ID NOs: 63-68, 74, 79, 81-86, and 98-111. In some embodiments, the coronavirus immunogen is a RBD immunogen having at least 90% (e.g., at least 90%, 91%, 92%, 93%, 94%, 95%, 96%, 97%, 98%, 99% or 100% sequence identity) identity with the amino acid sequence of any one of SEQ ID NOs: 63-68, 74, 79, 81-86, and 98-111. In some embodiments, the coronavirus immunogen is a RBD immunogen having at least 95% (e.g., at least 95%, 96%, 97%, 98%, 99% or 100% sequence identity) identity with the amino acid sequence of any one of SEQ ID NOs: 63-68, 74, 79, 81-86, and 98-111. In some embodiments, the coronavirus immunogen is a RBD immunogen having an amino acid sequence of any one of SEQ ID NOs: 63-68, 74, 79, 81-86, and 98-111.

[0006] In certain embodiments, the coronavirus immunogen is a Spike immunogen having at least 85% (e.g., at least 85%, 86%, 87%, 88%, 89%, 90%, 91%, 92%, 93%, 94%, 95%, 96%, 97%, 98%, 99% or 100% sequence identity) identity with the amino acid sequence of any one of SEQ ID NOs: 69-73, 75-78, 80, 87-97, and 283-286. In some embodiments, the coronavirus immunogen is a Spike immunogen having at least 90% (e.g., at least 90%, 91%, 92%, 93%, 94%, 95%, 96%, 97%, 98%, 99% or 100% sequence identity) identity with the amino acid sequence of any one of SEQ ID NOs: 69-73, 75-78, 80, 87-97, and 283-286. In some embodiments, the coronavirus immunogen is a Spike immunogen having at least 95% (e.g., at least 95%, 96%, 97%, 98%, 99% or 100% sequence identity) identity with the amino acid sequence of any one of SEQ ID NOs: 69-73, 75-78, 80, 87-97, and 283-286. In some embodiments, the coronavirus immunogen is a Spike immunogen having an amino acid sequence of any one of SEQ ID NOs: 69-73, 75-78, 80, 87-97, and 283-286.

[0007] In certain embodiments, the coronavirus immunogen is a nonstructural protein (nsp) having at least 85% (e.g., at least 85%, 86%, 87%, 88%, 89%, 90%, 91%, 92%, 93%, 94%, 95%, 96%, 97%, 98%, 99% or 100% sequence identity) identity with the amino acid sequence of any one of SEQ ID NOs: 291-295. In some embodiments, the coronavirus immunogen is a nsp immunogen having at least 90% (e.g., at least 90%, 91%, 92%, 93%, 94%, 95%, 96%, 97%, 98%, 99% or 100% sequence identity) identity with the amino acid sequence of any one of SEQ ID NOs: 291-295. In some embodiments, the coronavirus immunogen is a nsp immunogen having at least 95% (e.g., at least 95%, 96%, 97%, 98%, 99% or 100% sequence identity) identity with the amino acid sequence of any one of SEQ ID NOs: 291-295. In some embodiments, the coronavirus immunogen is a nsp immunogen having an amino acid sequence of any one of SEQ ID NOs: 291-295.

[0008] In some embodiments, the open reading frame includes a nucleic acid sequence having at least 85% (e.g., at least 85%, 86%, 87%, 88%, 89%, 90%, 91%, 92%, 93%, 94%, 95%, 96%, 97%, 98%, 99% or 100% sequence identity) sequence identity with the nucleic acid sequence of any one of SEQ ID NOs: 112-174 and 292-300. In some embodiments, the open reading frame includes a nucleic acid sequence having at least 90% (e.g., at least 90%, 91%, 92%, 93%, 94%, 95%, 96%, 97%, 98%, 99% or 100% sequence identity) sequence identity with the nucleic acid sequence of any one of SEQ ID NOs: 112-174 and 292-300. In some embodiments, the open reading frame includes a nucleic acid sequence having at least 95% (e.g., at least 95%, 96%, 97%, 98%, 99% or 100% sequence identity) sequence identity with the nucleic acid sequence of any one of SEQ ID NOs: 112-174 and 292-300. In some embodiments, the open reading frame includes a nucleic acid sequence of any one of SEQ ID NOs: 112-174 and 292-300.

[0009] In some embodiments, the coronavirus immunogen is a RBD immunogen having at least 85% (e.g., at least 85%, 86%, 87%, 88%, 89%, 90%, 91%, 92%, 93%, 94%, 95%, 96%, 97%, 98%, 99% or 100% sequence identity) identity with the nucleic acid sequence of any one of SEQ ID NOs: 112-117, 123, 128, 133-138, and 163-174. In some embodiments, the coronavirus immunogen is a RBD immunogen having at least 90% (e.g., at least 90%, 91%, 92%, 93%, 94%, 95%, 96%, 97%, 98%, 99% or 100% sequence identity) identity with the nucleic acid sequence of any one of SEQ ID NOs: 112-117, 123, 128, 133-138, and 163-174. In some embodiments, the coronavirus immunogen is a RBD immunogen having at least 95% (e.g., at least 95%, 96%, 97%, 98%, 99% or 100% sequence identity) identity with the nucleic acid sequence of any one of SEQ ID NOs: 112-117, 123, 128, 133-138, and 163-174. In some embodiments, the coronavirus immunogen is a RBD immunogen having a nucleic acid sequence of any one of SEQ ID NOs: 112-117, 123, 128, 133-138, and 163-174.

[0010] In some embodiments, the coronavirus immunogen is a Spike immunogen having at least 85% (e.g., at least 85%, 86%, 87%, 88%, 89%, 90%, 91%, 92%, 93%, 94%, 95%, 96%, 97%, 98%, 99% or 100% sequence identity) identity with the nucleic acid sequence of any one of SEQ ID NOs: 118-122, 124-127, 129-132, 139-162, and 287-291. In some embodiments, the coronavirus immunogen is a Spike immunogen having at least 90% (e.g., at least 90%, 91%, 92%, 93%, 94%, 95%, 96%, 97%, 98%, 99% or 100% sequence identity) identity with the nucleic acid sequence of any one of SEQ ID NOs: 118-122, 124-127, 129-132, 139-162, and 287-291. In some embodiments, the coronavirus immunogen is a Spike immunogen having at least 95% (e.g., at least 95%, 96%, 97%, 98%, 99% or 100% sequence identity) identity with the nucleic acid sequence of any one of SEQ ID NOs: 118-122, 124-127, 129-132, 139-162, and 287-291. In some embodiments, the coronavirus immunogen is a Spike immunogen having a nucleic acid sequence of any one of SEQ ID NOs: 118-122, 124-127, 129-132, 139-162, and 287-291.

[0011] In some embodiments, the coronavirus immunogen is a nsp immunogen having at least 85% (e.g., at least 85%, 86%, 87%, 88%, 89%, 90%, 91%, 92%, 93%, 94%, 95%, 96%, 97%, 98%, 99% or 100% sequence identity) identity with the nucleic acid sequence of any one of SEQ ID NOs: 296-300, nsp nsp immunogen having at least 90% (e.g., at least 90%, 91%, 92%, 93%, 94%, 95%, 96%, 97%, 98%, 99% or 100% sequence identity) identity with the nucleic acid sequence of any one of SEQ ID NOs: 296-300. In some embodiments, the coronavirus immunogen is a nsp immunogen having at least 95% (e.g., at least 95%, 96%, 97%, 98%, 99% or 100% sequence identity) identity with the nucleic acid sequence of any one of SEQ ID NOs: 296-300. In some embodiments, the coronavirus immunogen is a nsp immunogen having a nucleic acid sequence of any one of SEQ ID NOs: 296-300.

[0012] In some embodiments, the open reading frame encoding the coronavirus immunogen is operably linked to an IRES. In some embodiments, the open reading frame encoding the coronavirus immunogen encodes a second polypeptide. In some embodiments, the coronavirus immunogen and the second polypeptide are separated by a polypeptide linker, a 2A self-cleaving peptide, a protease cleavage site, or 2A self-cleaving peptide in tandem with a protease cleavage site. In some embodiments, the protease cleavage site is a furin cleavage site.

[0013] In some embodiments, the circular polyribonucleotide further includes a second open reading frame encoding a second polypeptide operably linked to a second IRES. In some embodiments, the second polypeptide is a polypeptide immunogen. In some embodiments, the second polypeptide is a viral immunogen. In some embodiments, the second polypeptide is a coronavirus immunogen. In some embodiments, the second coronavirus immunogen includes an amino acid sequence having at least 95% identity (e.g., at least 95%, 96%, 97%, 98%, 99%, or 100% identity) to any one of SEQ ID NOs: 1-10, 53, 55, 57, 63-111, and 283-291. In some embodiments, the second coronavirus immunogen includes an amino acid sequence of any one of SEQ ID NOs: 1-10, 53, 55, 57, 63-111, and 283-291. In some embodiments, the second polypeptide is an influenza immunogen.

[0014] In some embodiments, the second polypeptide is a polypeptide adjuvant. In some embodiments, the adjuvant is a cytokine, a chemokine, a costimulatory molecule, an innate immune stimulator, a signaling molecule, a transcriptional activator, a cytokine receptor, a bacterial component, or a component of the innate immune system. In some embodiments, the circular polyribonucleotide further includes a non-coding ribonucleic acid sequence that is an innate immune system stimulator. In some embodiments, the innate immune system stimulator is selected from a GU-rich motif, an AU-rich motif, a structured region including dsRNA, or an aptamer.

[0015] In another aspect, the disclosure provides a circular polyribonucleotide including a first sequence encoding a coronavirus immunogen and a second sequence encoding a polypeptide adjuvant. In some embodiments, the sequence encoding the coronavirus immunogen is operably linked to a first IRES and the sequence encoding the polypeptide adjuvant is operably linked to a second IRES. In some embodiments, the coronavirus immunogen and the polypeptide adjuvant are encoded by a single open-reading frame operably linked to an IRES. In some embodiments, coronavirus immunogen and the polypeptide adjuvant are separated by a polypeptide linker, a 2A self-cleaving peptide, a protease cleavage site, or 2A self-cleaving peptide in tandem with a protease cleavage site.

[0016] In some embodiments, polypeptide adjuvant is a cytokine, a chemokine, a costimulatory molecule, an innate immune stimulator, a signaling molecule, a transcriptional activator, a cytokine receptor, a bacterial component, or a component of the innate immune system. In some embodiments, the second coronavirus immunogen includes an amino acid sequence having at least 95% identity (e.g., at least 95%, 96%, 97%, 98%, 99%, or 100% identity) to any one of SEQ ID NOs: 1-10, 53, 55, 57, 63-111, and 283-291. In some embodiments, the second coronavirus immunogen includes an amino acid sequence of any one of SEQ ID NOs: 1-10, 53, 55, 57, 63-111, and 283-291.

[0017] In another aspect, the disclosure provides a circular polyribonucleotide including an open reading frame encoding a coronavirus immunogen and a non-coding ribonucleic acid sequence that is an innate immune system stimulator. In some embodiments, the innate immune system stimulator is selected from a GU-rich motif, an AU-rich motif, a structured region including dsRNA, or an aptamer. In some embodiments, the second coronavirus immunogen includes an amino acid sequence having at least 95% identity (e.g., at least 95%, 96%, 97%, 98%, 99%, or 100% identity) to any one of SEQ ID NOs: 1-10, 53, 55, 57, 63-111, and 283-291. In some embodiments, the second coronavirus immunogen includes an amino acid sequence of any one of SEQ ID NOs: 1-10, 53, 55, 57, 63-111, and 283-291.

[0018] In some embodiments, the open reading frame encodes a concatemeric coronavirus immunogen. In some embodiments, the open reading frame comprises between 2-100 coronavirus immunogens connected directly to one another or interspersed by linkers. In other embodiments the immunogen is a concatemeric peptide immunogen composed of multiple peptide epitopes. In some embodiments, the circular polyribonucleotide encodes 2-10 coronavirus immunogens. In some embodiments, the circular polyribonucleotide encodes at least 10, 20, 30, 40, 50, 60, 70, 80, 90 or 100 coronavirus immunogens. In some embodiments, the coronavirus immunogens are separated by a polypeptide linker, a 2A self-cleaving peptide, a protease cleavage site, or 2A self-cleaving peptide in tandem with a protease cleavage site. In some embodiments, the concatemeric coronavirus immunogen includes an amino acid sequence having at least 85% identity (e.g., at least 85%, 86%, 87%, 88%, 89%, 90%, 91%, 92%, 93%, 94%, 95%, 96%, 97%, 98%, 99%, or 100% identity) to any one of SEQ ID NOs: 63-111 and 283-291. In some embodiments, the concatemeric coronavirus immunogen includes an amino acid sequence having at least 95% identity (e.g., at least 95%, 96%, 97%, 98%, 99%, or 100% identity) to any one of SEQ ID NOs: 63-111 and 283-291. In some embodiments, the concatemeric coronavirus immunogen includes an amino acid sequence of any one of SEQ ID NOs: 63-111 and 283-291. In some embodiments, the concatemeric coronavirus immunogen includes a nucleic acid sequence having at least 85% identity (e.g., at least 85%, 86%, 87%, 88%, 89%, 90%, 91%, 92%, 93%, 94%, 95%, 96%, 97%, 98%, 99%, or 100% identity) to any one of SEQ ID NOs: 112-174 and 292-300. In some embodiments, the concatemeric coronavirus immunogen includes a nucleic acid sequence having at least 95% identity (e.g., at least 95%, 96%, 97%, 98%, 99%, or 100% identity) to any one of SEQ ID NOs: 112-174 and 292-300. In some embodiments, the concatemeric coronavirus immunogen includes a nucleic acid sequence of any one of SEQ ID NOs: 112-174 and 292-300.

[0019] In another aspect, the disclosure provides a circular polyribonucleotide including a first sequence encoding a coronavirus immunogen and a second sequence encoding a multimerization domain. In some embodiments, the multimerization domain includes a T4 foldon domain. In some embodiments, the multimerization domain includes a ferritin domain. In some embodiments, the multimerization domain includes a β-annulus peptide. In some embodiments, the multimerization domain is at the N-terminus of the coronavirus immunogen. In some embodiments, the multimerization domain is at the C-terminus of the coronavirus immunogen.

[0020] In another aspect, the disclosure provides an immunogenic composition including any one of the circular polyribonucleotides described herein, a pharmaceutically acceptable excipient, and is free of any carrier. In another aspect, the disclosure provides an immunogenic composition including any one of the circular polyribonucleotides described herein and a pharmaceutically acceptable carrier or excipient. In some embodiments, the composition further includes a second circular polyribonucleotide. In some embodiments, the second circular polyribonucleotide includes an open reading frame encoding a second polypeptide immunogen. In some embodiments, the second circular polyribonucleotide includes a non-coding ribonucleic acid sequence that is an innate immune system stimulator.

[0021] In another aspect, the disclosure provides a linear polyribonucleotide including an open reading frame encoding a coronavirus immunogen, wherein the coronavirus immunogen includes an amino acid sequence having at least 85% (e.g., at least 85%, 86%, 87%, 88%, 89%, 90%, 91%, 92%, 93%, 94%, 95%, 96%, 97%, 98%, 99%, or 100%) sequence identity with the amino acid sequence of any one of SEQ ID NOs: 63-111 and 283-291. In some embodiments, the coronavirus immunogen includes an amino acid sequence having at least 90% (e.g., at least 90%, 91%, 92%, 93%, 94%, 95%, 96%, 97%, 98%, 99%, or 100%) sequence identity with the amino acid sequence of any one of SEQ ID NOs: 63-111 and 283-291. In some embodiments, the coronavirus immunogen includes an amino acid sequence having at least 95% (e.g., at least 95%, 96%, 97%, 98%, 99%, or 100%) sequence identity with the amino acid sequence of any one of SEQ ID NOs: 63-111 and 283-291. In some embodiments, the coronavirus immunogen includes an amino acid sequence having an amino acid sequence of any one of SEQ ID NOs: 63-111 and 283-291.

[0022] In some embodiments, the open reading frame includes a nucleic acid sequence having at least 85% (e.g., at least 85%, 86%, 87%, 88%, 89%, 90%, 91%, 92%, 93%, 94%, 95%, 96%, 97%, 98%, 99%, or 100%) sequence identity with the nucleic acid sequence of any one of SEQ ID NOs: 112-174 and 292-300. In some embodiments, the open reading frame includes a nucleic acid sequence having at least 90% (e.g., at least 90%, 91%, 92%, 93%, 94%, 95%, 96%, 97%, 98%, 99%, or 100%) sequence identity with the nucleic acid sequence of any one of SEQ ID NOs: 112-174 and 292-300. In some embodiments, the open reading frame includes a nucleic acid sequence having at least 95% (e.g., at least 95%, 96%, 97%, 98%, 99%, or 100%) sequence identity with the nucleic acid sequence of any one of SEQ ID NOs: 112-174 and 292-300. In some embodiments, the open reading frame includes a nucleic acid sequence having a nucleic acid sequence of any one of SEQ ID NOs: 112-174 and 292-300.

[0023] In some embodiments, the open reading frame encoding the coronavirus immunogen is operably linked to an IRES. In some embodiments, the open reading frame encoding the coronavirus immunogen encodes a second polypeptide. In some embodiments, the coronavirus immunogen and the second polypeptide are separated by a polypeptide linker, a 2A self-cleaving peptide, a protease cleavage site, or 2A self-cleaving peptide in tandem with a protease cleavage site. In some embodiments, the protease cleavage site is a furin cleavage site.

[0024] In some embodiments, the circular polyribonucleotide further includes a second open reading frame encoding a second polypeptide operably linked to a second IRES. In some embodiments, the second polypeptide is a polypeptide immunogen. In some embodiments, the second polypeptide is a coronavirus immunogen. In some embodiments, the second polypeptide is a polypeptide adjuvant. In some embodiments, the adjuvant is a cytokine, a chemokine, a costimulatory molecule, an innate immune stimulator, a signaling molecule, a transcriptional activator, a cytokine receptor, a bacterial component, or a component of the innate immune system. In some embodiments, the linear polyribonucleotide further includes a non-coding ribonucleic acid sequence that is an innate immune system stimulator. In some embodiments, the innate immune system stimulator is selected from a GU-rich motif, an AU-rich motif, a structured region including dsRNA, or an aptamer.

[0025] In another aspect the disclosure provides a linear polyribonucleotide including a first sequence encoding a coronavirus immunogen and a second sequence encoding a multimerization domain. In some embodiments, the multimerization domain includes a T4 foldon domain. In some embodiments, the multimerization domain includes a ferritin domain. In some embodiments, the multimerization domain includes a β-annulus peptide. In some embodiments, the multimerization domain is at the N-terminus of the coronavirus immunogen. In some embodiments, the multimerization domain is at the C-terminus of the coronavirus immunogen.

[0026] In another aspect, the disclosure provides an immunogenic composition including any one of the linear polyribonucleotides described herein and a pharmaceutically acceptable excipient and is free of any carrier. In another aspect, the disclosure provides an immunogenic composition including any one of the linear polyribonucleotides described herein and a pharmaceutically acceptable carrier and excipient. In some embodiments, the composition further includes a second linear polyribonucleotide. In some embodiments, the second linear polyribonucleotide includes an open reading frame encoding a second polypeptide immunogen. In some embodiments, the second linear polyribonucleotide includes an open reading frame encoding a polypeptide adjuvant. In some embodiments, the second linear polyribonucleotide includes a non-coding ribonucleic acid sequence that is an innate immune system stimulator.

[0027] In another aspect, the disclosure provides a method of inducing an immune response against a coronavirus immunogen in a non-human animal or human subject by: a) administering any one of the immunogenic compositions described herein to the non-human animal or human subject, and b) collecting antibodies against the coronavirus immunogen from the non-human animal or human subject. In some embodiments, further including administering an adjuvant to the non-human animal or human subject.

[0028] In another aspect, the disclosure provides a method of treating a subject who has or is suspected to have a SARS-CoV-2 infection including administering to the subject any one of the circular polyribonucleotides or immunogenic compositions described herein.

[0029] In another aspect, the disclosure provides a method of preventing a SARS-CoV-2 infection in a subject including administering to the subject any one of the circular polyribonucleotide or immunogenic compositions described herein. In some embodiments, the human subject is at risk for a SARS-CoV-2 infection. In some embodiments, the human subject is a human over 50 years old, an immune-compromised human, a human with a chronic health condition, or a health care worker. In some embodiments, administering the circular polyribonucleotide or immunogenic composition decreases the frequency or severity of symptoms associated with a SARS-CoV-2 infection. In some embodiments, the subject is a human subject. In some embodiments, the method further includes administering an adjuvant to the subject.

### Definitions

[0030] The present invention will be described with respect to particular embodiments and with reference to certain figures, but the invention is not limited thereto but only by the claims. Terms as set forth hereinafter are generally to be understood in their common sense unless indicated otherwise.

[0031] As used herein, the term “adaptive immune response” means either a humoral or cell-mediated immune response. For purposes of the present disclosure, a “humoral immune response” refers to an immune response mediated by antibody molecules, while a “cellular immune response” is one mediated by T-lymphocytes and/or other white blood cells.

[0032] As used herein, the term “adjuvant” refers to a composition (e.g., a compound, polypeptide, nucleic acid, or lipid) that increases an immune response, for example, increases a specific immune response against an immunogen. Increasing an immune response includes intensification or broadening the specificity of either or both antibody and cellular immune responses.

[0033] As used herein, the terms “circRNA,” “circular polyribonucleotide,” “circular RNA,” and “circular polyribonucleotide molecule” are used interchangeably and mean a polyribonucleotide molecule that has a structure having no free ends (i.e., no free 3′ and/or 5′ ends), for example a polyribonucleotide molecule that forms a circular or end-less structure through covalent (e.g., covalently closed) or non-covalent bonds. The circular polyribonucleotide may be covalently closed polyribonucleotide.

[0034] As used herein, the term “circularization efficiency” is a measurement of resultant circular polyribonucleotide versus its non-circular starting material.

[0035] The term “diluent” means a vehicle comprising an inactive solvent in which a composition described herein (e.g., a composition comprising a circular polyribonucleotide) may be diluted or dissolved. A diluent can be an RNA solubilizing agent, a buffer, an isotonic agent, or a mixture thereof. A diluent can be a liquid diluent or a solid diluent. Non-limiting examples of liquid diluents include water or other solvents, solubilizing agents, and emulsifiers such as ethyl alcohol, isopropyl alcohol, ethyl carbonate, ethyl acetate, benzyl alcohol, benzyl benzoate, propylene glycol, 1,3-butylene glycol, dimethylformamide, oils (in particular, cottonseed, groundnut, corn, germ, olive, castor, and sesame oils), glycerol, tetrahydrofurfuryl alcohol, polyethylene glycols and fatty acid esters of sorbitan, and 1,3-butanediol. Non-limiting examples of solid diluents include calcium carbonate, sodium carbonate, calcium phosphate, dicalcium phosphate, calcium sulfate, calcium hydrogen phosphate, sodium phosphate, lactose, sucrose, cellulose, microcrystalline cellulose, kaolin, mannitol, sorbitol, inositol, sodium chloride, dry starch, cornstarch, or powdered sugar.

[0036] As used herein, the term “epitope” refers to a portion or the whole of an immunogen that is recognized, targeted, or bound by an antibody or T cell receptor. An epitope can be a linear epitope, for example, a contiguous sequence of nucleic acids or amino acids. An epitope can be a conformational epitope, for example, an epitope that contains amino acids that form an epitope in the folded conformation of the protein. A conformational epitope can contain non-contiguous amino acids from a primary amino acid sequence. As another example, a conformational epitope includes nucleic acids that form an epitope in the folded conformation of an immunogenic sequence based on its secondary structure or tertiary structure.

[0037] As used herein, the term “expression sequence” is a nucleic acid sequence that encodes a product, e.g., a polypeptide (e.g., an immunogen), or a regulatory nucleic acid. An exemplary expression sequence that codes for a polypeptide can comprise a plurality of nucleotide triads, each of which can code for an amino acid and is termed as a “codon”.

[0038] As used herein, the term “fragment” with respect to a polypeptide or a nucleic acid sequence, e.g., a polypeptide immunogen or a nucleic acid sequence encoding a polypeptide immunogen, refers to a continuous, less than a whole portion of a sequence of the polypeptide or the nucleic acid. A fragment of a polypeptide immunogen or a nucleic acid sequence encoding a polypeptide immunogen, for instance, refers to continuous, less than a whole fraction (e.g., at least 20%, 30%, 40%, 50%, 60%, 70%, 80%, 90%, 95%, or 99% of the entire length) of the sequence such as a sequence disclosed herein. It is understood that all the present disclosure contemplates fragments (e.g., immunogenic fragments) of all immunogens disclosed herein.

[0039] As used herein, the term “GC content” refers to the percentage of guanine (G) and cytosine (C) in a nucleic acid sequence. The formula for calculation of the GC content is (G+C)/(A+G+C+U)×100% (for RNA) or (G+C)/(A+G+C+T)×100% (for DNA). Likewise, the term “uridine content” refers to the percentage of uridine (U) in a nucleic acid sequence. The formula for calculation of the uridine content is U/(A+G+C+U)×100%. Likewise, the term “thymidine content” refers to the percentage of thymidine (T) in a nucleic acid sequence. The formula for calculation of the thymidine content is T/(A+G+C+T)×100%.

[0040] As used herein, the term “innate immune system stimulator” refers to a substance that induces an innate immunological response, in part, by inducing expression of one or more genes involved in innate immunity, including, but not limited to, a type I interferon (e.g., IFNα, INFβ, and/or IFNγ), a pro-inflammatory cytokine (e.g., IL-1, IL-12, IL-18, TNF-α, and/or GM-CSF), retinoic-acid inducible gene-I (RIG-1, also known as DDX58), melanoma-differentiation-associated gene 5 (MDA5, also known as IFIH1), 2′-5′ oligoadenylate synthase 1 (OAS 1), OAS-like protein (OASL), and/or protein kinase R (PKR). An innate immune system stimulator may act as an adjuvant, e.g., when administered in combination with or formulated with a ribonucleotide that encodes an immunogen. An innate immune system stimulator may be a separate molecule entity (e.g., not encoded by or incorporated as a sequence in a polyribonucleotide), for example, STING (e.g., caSTING), TLR3, TLR4, TLR9, TLR7, TLR8, TLR7, RIG-I/DDX58, and MDA-5/IFIH1 or a constitutively active mutant thereof. An innate immune system stimulator may be encoded by (e.g., expressed from) a polyribonucleotide. A polyribonucleotide may alternately or further include a ribonucleotide sequence that acts as an innate immune system stimulator (e.g., GU-rich motif, an AU-rich motif, a structured region including dsRNA, or an aptamer).

[0041] As used herein, the terms “human antibody,” “human immunoglobulin,” and “human polyclonal antibody” are used interchangeably and mean an antibody or antibodies produced in a non-human animal that is otherwise indistinguishable from antibody produced in a human vaccinated by the same circular RNA preparation. This is in contrast to “humanized antibodies” which are modified to have human characteristics, such as through generation of chimeras, but that maintain attributes of the host animal in which they are produced. Because human antibody made according to the method disclosed herein is comprised of IgG that are fully human, no enzymatic treatment is needed to eliminate the risk of anaphylaxis and serum sickness associated with heterologous species IgG.

[0042] As used herein, the term “immunogen” refers to any molecule or molecular structure that includes one or more epitopes recognized, targeted, or bound by an antibody or a T cell receptor. In particular, an immunogen induces an immune response in a subject (e.g., is immunogenic as defined herein). An immunogen is capable of inducing an immune response in a subject, wherein the immune response refers to a series of molecular, cellular, and organismal events that are induced when an immunogen is encountered by the immune system. The immune response may be humoral and/or cellular immune response. These may include the production of antibodies and the expansion of B- and T-cells. To determine whether an immune response has occurred and to follow its course, the immunized subject can be monitored for the appearance of immune reactants directed at the specific immunogen. Immune responses to most immunogens induce the production of both specific antibodies and specific effector T cells. In some embodiments, the immunogen is foreign to a host.

[0043] In some embodiments, the immunogen is not foreign to a host. An immunogen may include all or a portion of a polypeptide, a polysaccharide, a polynucleotide, or a lipid. An immunogen may also be a mixed polypeptide, polysaccharide, polynucleotide, and/or lipid. For example, an immunogen may be a polypeptide that has been translationally modified. A “polypeptide immunogen” refers to an immunogen that includes a polypeptide. A polypeptide immunogen may also include one or more post-translational modifications, and/or may form a complex with one or more additional molecules, and/or may adopt a tertiary or quaternary structure, each of which may determine or affect the immunogenicity of the polypeptide.

[0044] As used herein, the term “immunogenic” is a potential to induce a response to a substance in a particular immune response assay above a pre-determined threshold. The assay can be, e.g., expression of certain inflammatory markers, production of antibodies, or an assay for immunogenicity as described herein. In some embodiments, an immune response may be induced when an immune system of an organism or a certain type of immune cells are exposed to an immunogen.

[0045] An immunogenic response may be assessed may evaluating the antibodies in the plasma or serum of a subject using a total antibody assay, a confirmatory test, titration and isotyping of the antibodies, and neutralizing antibody assessment. A total antibody assay measures all the antibodies generated as part of the immune response in the serum or plasma of a subject that has been administered the immunogen. The most commonly used test to detect antibodies is an ELISA (enzyme-linked immunosorbent assay), which detects antibodies in the tested serum that bind to the antibody of interest, including IgM, IgD, IgG, IgA, and IgE. An immunogenic response can be further assessed by a confirmatory assay. Following a total antibody assessment, a confirmatory assay may be used to confirm the results of the total antibody assay. A competition assay may be used to confirm that antibody is specifically binding to target and that the positive finding in the screening assay is not a result of non-specific interactions of the test serum or detection reagent with other materials in the assay.

[0046] An immunogenic response can be assessed by isotyping and titration. An isotyping assay may be used to assess only the relevant antibody isotypes. For example, the expected isotypes may be IgM and IgG which may be specifically detected and quantified by isotyping and titration, and then compared to the total antibodies present.

[0047] An immunogenic response can be assessed by a neutralizing antibody assay (nAb). A neutralizing antibody assay (nAb) may be used to determine if the antibodies produced in response to the immunogen neutralized the immunogen thereby inhibiting the immunogen from having an effect on the target and leading to abnormal pharmacokinetic behaviors. An nAb assay is often a cell-based assay where the target cells are incubated with the antibody. A variety of cell based nAb assays may be used including but not limited to Cell Proliferation, Viability, Antibody-Dependent Cell-Mediated Cytotoxicity (ADCC), Complement-Dependent Cytotoxicity (CDC), Cytopathic Effect Inhibition (CPE), Apoptosis, Ligand Stimulated Cell Signaling, Enzyme Activity, Reporter Gene Assays, Protein Secretion, Metabolic Activity, Stress and Mitochondrial Function. Detection readouts include Absorbance, Fluorescence, Luminescence, Chemiluminescence, or Flow Cytometry. A ligand-binding assay may also be used to measure the binding affinity of an immunogen and an antibody in vitro to evaluate neutralization efficacy.

[0048] Furthermore, induction of a cellular immune response may be assessed by measuring T cell activation in a subject using cellular markers on T cells obtained from the subject. A blood sample, lymph node biopsy, or tissue sample can be collected from a subject and T cells from the sample evaluated for one or more (e.g., 2, 3, 4 or more) activation markers: CD25, CD71, CD26, CD27, CD28, CD30, CD154, CD40 L, CD134, CD69, CD62 L or CD44. T cell activation can also be assessed using the same methods in an in vivo animal model. This assay can also be performed by adding an immunogen to T cells in vitro (e.g., T cells obtained from a subject, animal model, repository, or commercial source) and measuring the aforementioned markers to evaluate T cell activation. Similar approaches can be used to assess the effect of and on activation of other immune cells, such as eosinophils (markers: CD35, CD11 b, CD66, CD69 and CD81), dendritic cells (makers: IL-8, MHC class II, CD40, CD80, CD83, and CD86), basophils (CD63, CD13, CD4, and CD203c), and neutrophils (CD11 b, CD35, CD66b and CD63). These markers can be assessed using flow cytometry, immunohistochemistry, in situ hybridization, and other assays that allow for measurement of cellular markers. Comparing results from before and after administration of an immunogen can be used to determine its effect.

[0049] As used herein, the term “impurity” is an undesired substance present in a composition, e.g., a pharmaceutical composition as described herein. In some embodiments, an impurity is a process-related impurity. In some embodiments, an impurity is a product-related substance other than the desired product in the final composition, e.g., other than the active drug ingredient, e.g., circular or linear polyribonucleotide, as described herein. As used herein, the term “process-related impurity” is a substance used, present, or generated in the manufacturing of a composition, preparation, or product that is undesired in the final composition, preparation, or product other than the linear polyribonucleotides described herein. In some embodiments, the process-related impurity is an enzyme used in the synthesis or circularization of polyribonucleotides. As used herein, the term “product-related substance” is a substance or byproduct produced during the synthesis of a composition, preparation, or product, or any intermediate thereof. In some embodiments, the product-related substance is deoxyribonucleotide fragments. In some embodiments, the product-related substance is deoxyribonucleotide monomers. In some embodiments, the product-related substance is one or more of: derivatives or fragments of polyribonucleotides described herein, e.g., fragments of 10, 9, 8, 7, 6, 5, or 4 ribonucleic acids, monoribonucleic acids, diribonucleic acids, or triribonucleic acids.

[0050] As used herein, the term “inducing an immune response” refers to initiating, amplifying, or sustaining an immune response by a subject. Inducing an immune response may refer to an adaptive immune response or an innate immune response. The induction of an immune response may be measured as discussed above.

[0051] As used herein, the terms “linear RNA,” “linear polyribonucleotide,” and “linear polyribonucleotide molecule” are used interchangeably and mean a monoribonucleotide molecule or polyribonucleotide molecule having a 5′ and 3′ end. One or both of the 5′ and 3′ ends may be free ends or joined to another moiety. In some embodiments, the linear RNA has a 5′ end or 3′ end that is modified or protected from degradation (e.g., by a 5′ end protectant or a 3′ end protectant). In some embodiments, the linear RNA has non-covalently linked 5′ or 3′ ends. A linear RNA can be used as a starting material for circularization through, for example, splint ligation, or chemical, enzymatic, ribozyme- or splicing-catalyzed circularization methods.

[0052] As used herein, the term “linear counterpart” is a polyribonucleotide molecule (and its fragments) having the same or similar nucleotide sequence (e.g., 100%, 95%, 90%, 85%, 80%, 75%, or any percentage therebetween sequence similarity) as a circular polyribonucleotide and having two free ends (i.e., the uncircularized version (and its fragments) of the circularized polyribonucleotide). In some embodiments, the linear counterpart (e.g., a pre-circularized version) is a polyribonucleotide molecule (and its fragments) having the same or similar nucleotide sequence (e.g., 100%, 95%, 90%, 85%, 80%, 75%, or any percentage therebetween sequence similarity) and same or similar nucleic acid modifications as a circular polyribonucleotide and having two free ends (i.e., the uncircularized version (and its fragments) of the circularized polyribonucleotide). In some embodiments, the linear counterpart is a polyribonucleotide molecule (and its fragments) having the same or similar nucleotide sequence (e.g., 100%, 95%, 90%, 85%, 80%, 75%, or any percentage therebetween sequence similarity) and different or no nucleic acid modifications as a circular polyribonucleotide and having two free ends (i.e., the uncircularized version (and its fragments) of the circularized polyribonucleotide). In some embodiments, a fragment of the polyribonucleotide molecule that is the linear counterpart is any portion of linear counterpart polyribonucleotide molecule that is shorter than the linear counterpart polyribonucleotide molecule. In some embodiments, the linear counterpart further comprises a 5′ cap. In some embodiments, the linear counterpart further comprises a poly adenosine tail. In some embodiments, the linear counterpart further comprises a 3′ UTR. In some embodiments, the linear counterpart further comprises a 5′ UTR.

[0053] As used herein, the term “modified ribonucleotide” is a nucleotide with at least one modification to the sugar, the nucleobase, or the internucleoside linkage.

[0054] As used herein, the term “multimerization domain” refers to a polypeptide domain that self-assembles to form multimers (e.g., dimers, trimers, tetramers, or oligomers). In particular embodiments, a multimerization domain can be fused to a polypeptide (e.g., a polypeptide immunogen). In such instances, fusion to a multimerization domain results in the formation of a multimeric immunogen complex having more than one immunogen upon expression of the polypeptide including an immunogen covalently attached to a multimerization domain.

[0055] As used herein, the term “naked,” “naked delivery,” and its cognates means a formulation for delivery to a cell without the aid of a carrier and without covalent modification to a moiety that aids in delivery to a cell. A naked delivery formulation is free from any transfection reagents, cationic carriers, carbohydrate carriers, nanoparticle carriers, or protein carriers. For example, naked delivery formulation of a circular polyribonucleotide is a formulation that comprises a circular polyribonucleotide without covalent modification and is free from a carrier. A naked delivery formulation may comprise non-carrier pharmaceutical excipients or diluents.

[0056] As used herein, the term “naked delivery” means a formulation for delivery to a cell without the aid of a carrier and without covalent modification to a moiety that aids in delivery to a cell. A naked delivery formulation is free from any transfection reagents, cationic carriers, carbohydrate carriers, nanoparticle carriers, or protein carriers. For example, naked delivery formulation of a circular polyribonucleotide is a formulation that includes a circular polyribonucleotide without covalent modification and is free from a carrier.

[0057] As used herein, the terms “nicked RNA,” “nicked linear polyribonucleotide,” and “nicked linear polyribonucleotide molecule” are used interchangeably and mean a polyribonucleotide molecule having a 5′ and 3′ end that results from nicking or degradation of a circular RNA.

[0058] As used herein, the term “non-circular RNA” means total nicked RNA and linear RNA.

[0059] The term “pharmaceutical composition” is intended to also disclose that the circular polyribonucleotide included within a pharmaceutical composition can be used for the treatment of the human or animal body by therapy. It is thus meant to be equivalent to “a circular polyribonucleotide for use in therapy”.

[0060] The term “polynucleotide” as used herein means a molecule including one or more nucleic acid subunits, or nucleotides, and can be used interchangeably with “nucleic acid” or “oligonucleotide”. A polynucleotide can include one or more nucleotides selected from adenosine (A), cytosine (C), guanine (G), thymine (T) and uracil (U), or variants thereof. A nucleotide can include a nucleoside and at least 1, 2, 3, 4, 5, 6, 7, 8, 9, 10, or more phosphate (PO3) groups. A nucleotide can include a nucleobase, a five-carbon sugar (either ribose or deoxyribose), and one or more phosphate groups. Ribonucleotides are nucleotides in which the sugar is ribose. Polyribonucleotides or ribonucleic acids, or RNA, can refer to macromolecules that include multiple ribonucleotides that are polymerized via phosphodiester bonds. Deoxyribonucleotides are nucleotides in which the sugar is deoxyribose.

[0061] “Polydeoxyribonucleotides,” “deoxyribonucleic acids,” and “DNA” mean macromolecules that include multiple deoxyribonucleotides that are polymerized via phosphodiester bonds. A nucleotide can be a nucleoside monophosphate or a nucleoside polyphosphate. A nucleotide means a deoxyribonucleoside polyphosphate, such as, e.g., a deoxyribonucleoside triphosphate (dNTP), which can be selected from deoxyadenosine triphosphate (dATP), deoxycytidine triphosphate (dCTP), deoxyguanosine triphosphate (dGTP), uridine triphosphate (dUTP) and deoxythymidine triphosphate (dTTP) dNTPs, that include detectable tags, such as luminescent tags or markers (e.g., fluorophores). A nucleotide can include any subunit that can be incorporated into a growing nucleic acid strand. Such subunit can be an A, C, G, T, or U, or any other subunit that is specific to one or more complementary A, C, G, T or U, or complementary to a purine (i.e., A or G, or variant thereof) or a pyrimidine (i.e., C, T or U, or variant thereof). In some examples, a polynucleotide is deoxyribonucleic acid (DNA), ribonucleic acid (RNA), or derivatives or variants thereof. In some cases, a polynucleotide is a short interfering RNA (siRNA), a microRNA (miRNA), a plasmid DNA (pDNA), a short hairpin RNA (shRNA), small nuclear RNA (snRNA), messenger RNA (mRNA), precursor mRNA (pre-mRNA), antisense RNA (asRNA), to name a few, and encompasses both the nucleotide sequence and any structural embodiments thereof, such as single-stranded, double-stranded, triple-stranded, helical, hairpin, etc. In some cases, a polynucleotide molecule is circular. A polynucleotide can have various lengths. A nucleic acid molecule can have a length of at least about 10 bases, 20 bases, 30 bases, 40 bases, 50 bases, 100 bases, 200 bases, 300 bases, 400 bases, 500 bases, 1 kilobase (kb), 2 kb, 3, kb, 4 kb, 5 kb, 10 kb, 50 kb, or more. A polynucleotide can be isolated from a cell or a tissue. As embodied herein, the polynucleotide sequences may include isolated and purified DNA/RNA molecules, synthetic DNA/RNA molecules, and synthetic DNA/RNA analogs.

[0062] Polynucleotides, e.g., polyribonucleotides or polydeoxyribonucleotides, may include one or more nucleotide variants, including nonstandard nucleotide(s), non-natural nucleotide(s), nucleotide analog(s) and/or modified nucleotides. Examples of modified nucleotides include, but are not limited to diaminopurine, 5-fluorouracil, 5-bromouracil, 5-chlorouracil, 5-iodouracil, hypoxanthine, xanthine, 4-acetylcytosine, 5-(carboxyhydroxylmethyl)uracil, 5-carboxymethylaminomethyl-2-thiouridine, 5-carboxymethylaminomethyluracil, dihydrouracil, beta-D-galactosylqueosine, inosine, N6-isopentenyladenine, 1-methylguanine, 1-methylinosine, 2,2-dimethylguanine, 2-methyladenine, 2-methylguanine, 3-methylcytosine, 5-methylcytosine, N6-adenine, 7-methylguanine, 5-methylaminomethyluracil, 5-methoxyaminomethyl-2-thiouracil, beta-D-mannosylqueosine, 5′-methoxycarboxymethyluracil, 5-methoxyuracil, 2-methylthio-N6-isopentenyladenine, uracil-5-oxyacetic acid, wybutoxosine, pseudo uracil, queosine, 2-thiocytosine, 5-methyl-2-thiouracil, 2-thiouracil, 4-thiouracil, 5-methyluracil, uracil-5-oxyacetic acid methylester, uracil-5-oxyacetic acid(v), 5-methyl-2-thiouracil, 3-(3-amino-3-N-2-carboxypropyl) uracil, 3-(3-amino-3-carboxypropyl)uridine 2,6-diaminopurine and the like. In some cases, nucleotides may include modifications in their phosphate moieties, including modifications to a triphosphate moiety. Non-limiting examples of such modifications include phosphate chains of greater length (e.g., a phosphate chain having, 4, 5, 6, 7, 8, 9, 10 or more phosphate moieties) and modifications with thiol moieties (e.g., alpha-thiotriphosphate and beta-thiotriphosphates). Nucleic acid molecules may also be modified at the base moiety (e.g., at one or more atoms that typically are available to form a hydrogen bond with a complementary nucleotide and/or at one or more atoms that are not typically capable of forming a hydrogen bond with a complementary nucleotide), sugar moiety or phosphate backbone. Nucleic acid molecules may also contain amine-modified groups, such as amino ally 1-dUTP (aa-dUTP) and aminohexhylacrylamide-dCTP (aha-dCTP) to allow covalent attachment of amine reactive moieties, such as N-hydroxy succinimide esters (NHS). Alternatives to standard DNA base pairs or RNA base pairs in the oligonucleotides of the present disclosure can provide higher density in bits per cubic mm, higher safety (resistant to accidental or purposeful synthesis of natural toxins), easier discrimination in photo-programmed polymerases, or lower secondary structure. Such alternative base pairs compatible with natural and mutant polymerases for de novo and/or amplification synthesis are described in Betz K, Malyshev D A, Lavergne T, Welte W, Diederichs K, Dwyer T J, Ordoukhanian P, Romesberg F E, Marx A. NAT. CHEM. BIOL. 2012 July; 8(7):612-4, which is herein incorporated by reference for all purposes.

[0063] As used herein, “polypeptide” means a polymer of amino acid residues (natural or unnatural) linked together most often by peptide bonds. The term, as used herein, refers to proteins, polypeptides, and peptides of any size, structure, or function. Polypeptides can include gene products, naturally occurring polypeptides, synthetic polypeptides, homologs, orthologs, paralogs, fragments and other equivalents, variants, and analogs of the foregoing. A polypeptide can be a single molecule or may be a multi-molecular complex such as a dimer, trimer, or tetramer. They can also comprise single chain or multichain polypeptides such as antibodies or insulin and can be associated or linked. Most commonly disulfide linkages are found in multichain polypeptides. The term polypeptide can also apply to amino acid polymers in which one or more amino acid residues are an artificial chemical analogue of a corresponding naturally occurring amino acid.

[0064] As used herein, the term “prevent” means to reduce the likelihood of developing a disease, disorder, or condition, or alternatively, to reduce the severity or frequency of symptoms in a subsequently developed disease or disorder. A therapeutic agent can be administered to a subject who is at increased risk of developing a disease or disorder relative to a member of the general population in order to prevent the development of, or lessen the severity of, the disease or condition. A therapeutic agent can be administered as a prophylactic, e.g., before development of any symptom or manifestation of a disease or disorder.

[0065] As used interchangeably herein, the terms “polyA” and “polyA sequence” refer to an untranslated, contiguous region of a nucleic acid molecule of at least 5 nucleotides in length and consisting of adenosine residues. In some embodiments, a polyA sequence is at least 10 (SEQ ID NO: 330), at least 15 (SEQ ID NO: 331), at least 20 (SEQ ID NO: 332), at least 30 (SEQ ID NO: 333), at least 40 (SEQ ID NO: 334), or at least 50 (SEQ ID NO: 335) nucleotides in length. In some embodiments, a polyA sequence is located 3′ to (e.g., downstream of) an open reading frame (e.g., an open reading frame encoding a polypeptide), and the polyA sequence is 3′ to a termination element (e.g., a Stop codon) such that the polyA is not translated. In some embodiments, a polyA sequence is located 3′ to a termination element and a 3′ untranslated region.

[0066] As used herein, the term “regulatory element” is a moiety, such as a nucleic acid sequence, that modifies expression of an expression sequence within the circular polyribonucleotide.

[0067] As used herein, the term “replication element” is a sequence and/or motif useful for replication or that initiates transcription of the circular polyribonucleotide.

[0068] As used herein, the term “RNA equivalent” refers to an RNA sequence that is the RNA equivalent of a DNA sequence. An RNA equivalent of a DNA sequence therefore refers to a DNA sequence in which each of the thymidine (T) residues is replaced by a uridine (U) residue. For example, the disclosure provides DNA sequence for ribozymes identified by bioinformatics methods. The disclosure specifically contemplates that any of these DNA sequences may be converted to the corresponding RNA sequence and included in an RNA molecule described herein.

[0069] As used herein, the term “sequence identity” is determined by alignment of two peptide or two nucleotide sequences using a global or local alignment algorithm. Sequences may then be referred to as “substantially identical” or “essentially similar” when they (when optimally aligned by for example the programs GAP or BESTFIT using default parameters) share at least a certain minimal percentage of sequence identity. GAP uses the Needleman and Wunsch global alignment algorithm to align two sequences over their entire length, maximizing the number of matches and minimizes the number of gaps. Generally, the GAP default parameters are used, with a gap creation penalty=50 (nucleotides)/8 (proteins) and gap extension penalty=3 (nucleotides)/2 (proteins). For nucleotides the default scoring matrix used is a nwsgapdna.cmp scoring matrix and for proteins the default scoring matrix is Blosum62 (Henikoff & Henikoff, 1992, PNAS 89, 915-919). Sequence alignments and scores for percentage sequence identity may be determined using computer programs, such as the GCG Wisconsin Package, Version 10.3, available from Accelrys Inc., 9685 Scranton Road, San Diego, CA 92121-3752 USA, or EmbossWin version 2.10.0 (using the program “needle”). Alternatively, or additionally, percent identity may be determined by searching against databases, using algorithms such as FASTA, BLAST, etc. Sequence identity refers to the sequence identity over the entire length of the sequence.

[0070] A “signal sequence” refers to a polypeptide sequence, e.g., between 10 and 45 amino acids in length, that is present at the N-terminus of a polypeptide sequence of a nascent protein which targets the polypeptide sequence to the secretory pathway.

[0071] As used herein, the terms “treat” and “treating” refer to a therapeutic treatment of a disease or disorder (e.g., an infectious disease, a cancer, a toxicity, or an allergic reaction) in a subject. The effect of treatment can include reversing, alleviating, reducing severity of, curing, inhibiting the progression of, reducing the likelihood of recurrence of the disease or one or more symptoms or manifestations of the disease or disorder, stabilizing (i.e., not worsening) the state of the disease or disorder, and/or preventing the spread of the disease or disorder as compared to the state and/or the condition of the disease or disorder in the absence of the therapeutic treatment.

[0072] As used herein, the term “termination element” is a moiety, such as a nucleic acid sequence, that terminates translation of the expression sequence in the circular polyribonucleotide.

[0073] As used herein, the term “total ribonucleotide molecules” means the total amount of any ribonucleotide molecules, including linear polyribonucleotide molecules, circular polyribonucleotide molecules, monomeric ribonucleotides, other polyribonucleotide molecules, fragments thereof, and modified variations thereof, as measured by total mass of the ribonucleotide molecules

[0074] As used herein, the term “translation efficiency” is a rate or amount of protein or peptide production from a ribonucleotide transcript. In some embodiments, translation efficiency can be expressed as amount of protein or peptide produced per given amount of transcript that codes for the protein or peptide, e.g., in a given period of time, e.g., in a given translation system, e.g., an in vitro translation system like rabbit reticulocyte lysate, or an in vivo translation system like a eukaryotic cell or a prokaryotic cell.

[0075] As used herein, the term “translation initiation sequence” is a nucleic acid sequence that initiates translation of an expression sequence in the circular polyribonucleotide.

[0076] As used herein, a “variant” refers to a polypeptide which includes at least one alteration, e.g., a substitution, insertion, deletion, and/or fusion, at one or more residue positions, as compared to the parent or wild-type polypeptide. A variant may include between 1 and 10, 10 and 20, 20 and 50, 50 and 100, or more alterations.

### BRIEF DESCRIPTION OF THE DRAWINGS

[0077] FIG. 1 shows exemplary circular polyribonucleotides comprising a sequence encoding a coronavirus immunogen (e.g., a spike protein, a receptor binding domain (RBD) protein of a spike protein).

[0078] FIG. 2 shows exemplary polyribonucleotide constructs encoding a coronavirus immunogen and one or more multimerization domains.

[0079] FIG. 3 is a schematic of an exemplary circular RNA that includes two expression sequences, each expression sequence operably connected to an IRES, and where at least one expression sequence is a coronavirus immunogen.

[0080] FIG. 4 is a schematic of an exemplary circular RNA that includes two expression sequences, separated by a cleavage domain (e.g., a 2A, a furin site, or a furin-2A), where at least one expression sequence is a coronavirus immunogen, and all are operably linked to an IRES.

[0081] FIG. 5 shows a schematic of a plurality of circular RNAs, where a first circular RNA includes an ORF encoding a coronavirus immunogen and a second circular RNA includes an ORF encoding either a second immunogen or a polypeptide adjuvant.

[0082] FIG. 6A shows multi-immunogen expression from a circular polyribonucleotide. RBD immunogen expression was detected from circular RNAs encoding a SARSs-CoV-2 RBD immunogen and GLuc.

[0083] FIG. 6B shows multi-immunogen expression from a circular polyribonucleotide. GLuc activity was detected from circular RNAs encoding a SARS-CoV-2 RBD immunogen and GLuc.

[0084] FIG. 7A demonstrates immunogenicity of multiple immunogen immunogens from circular RNAs in mouse model. Mice were vaccinated with a first circular RNA encoding a SARS-CoV-2 RBD immunogen and a second circular RNA encoding GLuc. Anti-RBD antibodies were obtained at 17 days after injection.

[0085] FIG. 7B demonstrates immunogenicity of multiple immunogens from circular RNAs in mouse model. Mice were vaccinated with a first circular RNA encoding a SARS-CoV-2 RBD immunogen and a second circular RNA encoding GLuc. GLuc activity was detected at 2 days after injection.

[0086] FIG. 8A demonstrates immunogenicity of multiple immunogens from circular RNAs in mouse model. Mice were vaccinated with a first circular RNA encoding a SARS-CoV-2 RBD immunogen and a second circular RNA encoding Influenza hemagglutinin (HA) immunogen. Anti-RBD antibodies were obtained at 17 days after injection.

[0087] FIG. 8B demonstrates immunogenicity of multiple immunogens from circular RNAs in mouse model. Mice were vaccinated with a first circular RNA encoding a SARS-CoV-2 RBD immunogen and a second circular RNA encoding Influenza hemagglutinin (HA) immunogen. Anti-HA antibodies were obtained at 17 days after injection.

[0088] FIG. 9A demonstrates immunogenicity of multiple immunogens from circular RNAs in mouse model. Mice were vaccinated with a first circular RNA encoding a SARS-CoV-2 Spike immunogen and a second circular RNA encoding Influenza hemagglutinin (HA) immunogen. Anti-RBD (domain of Spike) antibodies were obtained at 17 days after injection.

[0089] FIG. 9B demonstrates immunogenicity of multiple immunogens from circular RNAs in mouse model. Mice were vaccinated with a first circular RNA encoding a SARS-CoV-2 Spike immunogen and a second circular RNA encoding Influenza hemagglutinin (HA) immunogen. Anti-HA antibodies were obtained at 17 days after injection.

[0090] FIG. 10 demonstrates an anti-HA antibody response in mice administered circular RNA encoding multiple immunogens. Mice were administered a circular RNA encoding: a SARS-CoV-2 RBD immunogen, a SARS-CoV-2 Spike immunogen, an Influenza HA immunogen, a SARS-CoV-2 RBD immunogen and an Influenza HA immunogen, a SARS-CoV-2 RBD immunogen and a GLuc protein, or a SARS-CoV-2 RBD immunogen and a SARS-CoV-2 Spike immunogen. A hemagglutination inhibition assay (HAI) was used to measure anti-Influenza HA antibodies. FIG. 10 shows HAI titer in samples that were administered circular RNA preparations encoding the Influenza HA immunogen when it was administered alone or when administered in combination with SARS-CoV-2 immunogens e.g., RBD or Spike.

[0091] FIG. 11 shows IL-12, measured using an IL-12 specific ELISA, was expressed from circular RNA in mammalian cells. A circular RNA encoding a SARS-CoV-2 RBD immunogen was included as a negative control.

[0092] FIG. 12A shows IL-12 expression was detected in serum at 2 days after injection with a circular RNA preparation including a first circular RNA encoding IL-12 and a second circular RNA encoding a SARS-CoV-2 RBD immunogen, in a mouse model. Injection with PBS or with a preparation including only the circular RNA encoding a SARS-CoV-2 RBD immunogen were included as controls.

[0093] FIG. 12B shows an increase in serum IFN-γ (directly downstream of IL12 signaling) was detected in serum at 2 days after injection with a circular RNA preparation including a first circular RNA encoding IL-12 and a second circular RNA encoding a SARS-CoV-2 RBD immunogen, in a mouse model. Injection with PBS or with a preparation including only the circular RNA encoding a SARS-CoV-2 RBD immunogen were included as controls.

[0094] FIG. 13A shows that administration of a circular RNA preparation including a first circular RNA encoding IL-12 and a second circular RNA encoding a SARS-CoV-2 RBD immunogen increased the number of SARS-CoV-2 RBD specific CD4 T cells. Administration of PBS or a preparation including only the circular RNA encoding a SARS-CoV-2 RBD immunogen were included as controls. Asterisks denotes statistical significance as determined by a two-way RM ANOVA protected Tukey's post hoc test.

[0095] FIG. 13B shows that administration of a circular RNA preparation including a first circular RNA encoding IL-12 and a second circular RNA encoding a SARS-CoV-2 RBD immunogen produced no change in the number of RBD specific CD8 T cells. Administration of PBS or a preparation including only the circular RNA encoding a SARS-CoV-2 RBD immunogen were included as controls.

[0096] FIG. 13C shows that administration of a circular RNA preparation including a first circular RNA encoding IL-12 and a second circular RNA encoding SARS-CoV-2 RBD immunogen increased the amount of IFN-γ production by CD4 T cells. Administration of PBS or a preparation including only the circular RNA encoding a SARS-CoV-2 RBD immunogen were included as controls. Asterisks denotes statistical significance as determined by unpaired t-test.

[0097] FIG. 13D shows that administration of a circular RNA preparation including a first circular RNA encoding IL-12 and a second circular RNA encoding a SARS-CoV-2 RBD immunogen increased the amount of IFN-γ production by CD8 T cells. Administration of PBS or a preparation including only the circular RNA encoding a SARS-CoV-2 RBD immunogen were included as controls. Asterisks denote statistical significance as determined by unpaired t-test.

[0098] FIG. 14 shows expression of SARS-CoV-2 Spike immunogen in the serum of cynomolgus monkeys after having been administered a 100 μg dose of lipid nanoparticle (LNP)-formulated circular RNA via intramuscular injection at day 0 (prime) and day 28 (boost).

[0099] FIG. 15 shows expression of a SARS-CoV-2 RBD immunogen fused to a T4 foldon multimerization domain in the serum of cynomolgus monkeys after having been administered a 100 μg dose of LNP-formulated circular RNA or a 1000 μg dose of adjuvanted circular RNA via intramuscular injection.

[0100] FIG. 16A shows that Spike-specific binding antibodies were primed in cynomolgus monkeys at day 42 after administration of the initial dose of LNP-formulated or adjuvanted circular RNA encoding either a SARS-CoV-2 Spike immunogen or a SARS-CoV-2 RBD immunogen fused to a T4 foldon multimerization domain.

[0101] FIG. 16B shows that RBD-specific binding antibodies were primed in cynomolgus monkeys at day 42 after administration of the initial dose of LNP-formulated or adjuvanted circular polyribonucleotide encoding either a SARS-CoV-2 Spike immunogen or SARS-CoV-2 RBD immunogen fused to a T4 foldon multimerization domain.

[0102] FIG. 17A shows that SARS-CoV-2 neutralizing antibodies were primed in cynomolgus monkeys at day 42 after administration of an initial 30 μg or 100 μg dose of LNP-formulated circular RNA encoding a SARS-CoV-2 Spike immunogen.

[0103] FIG. 17B shows that SARS-CoV-2 neutralizing antibodies were primed in cynomolgus monkeys at day 42 after administration of an initial dose of either a LNP-formulated circular polyribonucleotide encoding a SARS-CoV-2 RBD immunogen fused to a T4 foldon multimerization domain or an adjuvanted circular polyribonucleotide encoding a SARS-CoV-2 RBD immunogen fused to a T4 foldon multimerization domain.

### DETAILED DESCRIPTION

[0104] This disclosure provides compositions, pharmaceutical preparations, and methods relating to polyribonucleotides (e.g., circular polyribonucleotides or linear polyribonucleotides) encoding one or more immunogens and/or epitopes from a coronavirus. This disclosure also provides methods of using the circular polyribonucleotides encoding one or more one or more immunogens and/or epitopes from a coronavirus. Compositions and pharmaceutical preparations of circular polyribonucleotides described herein may induce an immune response in a subject upon administration. Compositions and pharmaceutical preparations of circular polyribonucleotides described herein may be used to treat or prevent a disease, disorder, or condition in a subject (e.g., SARS-CoV, e.g., SARS-CoV-1 or SARS-CoV-2).

### Circular Polyribonucleotide

[0105] The circular polyribonucleotides as disclosed herein comprise one or more expression sequences encoding one or more immunogens and/or epitopes from a coronavirus. This circular polyribonucleotide expresses the sequence encoding the one or more immunogens and/or epitopes from the coronavirus in a subject. In some embodiments, circular polyribonucleotides comprising one or more coronavirus immunogens and/or epitopes are used to produce an immune response in a subject. In some embodiments, circular polyribonucleotides comprising one or more coronavirus immunogens and/or epitopes are used to produce polyclonal antibodies as described herein.

### Coronavirus Immunogens and Epitopes

[0106] Circular polyribonucleotides described herein include at least one expression sequence encoding a coronavirus immunogen and/or epitope. Circular polyribonucleotides described herein may include multiple expression sequences, wherein at least one expression sequence encodes a coronavirus immunogen and/or epitope. Circular polyribonucleotides described herein may include two or more (two, three, four, five, six or more) expression sequences, wherein each expression sequence encodes a coronavirus immunogen and/or epitope. Circular polyribonucleotides described herein may include a first expression sequence that encodes a coronavirus immunogen and/or epitope and a second expression sequence that encodes an adjuvant. Circular polyribonucleotides described herein may include an expression sequence that encodes a coronavirus immunogen and/or epitope and a non-coding sequence that stimulates the innate immune system.

[0107] In some embodiments, the coronavirus is a pathogenic coronavirus. In some embodiments, the coronavirus is a respiratory pathogen. In some embodiments, the coronavirus is a blood borne pathogen. In some embodiments, the coronavirus is an enteric pathogen.

[0108] Non-limiting examples of coronaviruses of the disclosure include severe acute respiratory syndrome associated coronavirus (SARS-CoV, e.g., SARS-CoV-1, SARS-CoV-2), Middle East respiratory syndrome coronavirus (MERS-CoV), bat coronaviruses, zoonotic coronaviruses that can infect humans or other animals, newly emerged or newly discovered coronaviruses, and other coronaviruses.

[0109] In some embodiments, a circular polyribonucleotide comprises severe acute respiratory syndrome associated coronavirus (SARS-CoV) immunogens and/or epitopes. In some embodiments, a circular polyribonucleotide comprises SARS-CoV-1 immunogens and/or epitopes. In some embodiments, a circular polyribonucleotide comprises SARS-CoV-2 immunogens and/or epitopes. In some embodiments, a circular polyribonucleotide comprises Middle East respiratory syndrome coronavirus (MERS-CoV) immunogens and/or epitopes. In some embodiments, a circular polyribonucleotide comprises zoonotic coronavirus immunogens and/or epitopes that can infect humans or other animals. In some embodiments, a circular polyribonucleotide comprises immunogens and/or epitopes from a newly emerged coronavirus.

[0110] In some embodiments, a circular polyribonucleotide comprises Coronaviridae immunogens and/or epitopes.

[0111] In some embodiments, a circular polyribonucleotide comprises immunogens and/or epitopes from a genus or subgenus that is Alphacoronavirus, Betacoronavirus, Gammacoronavirus, Deltacoronavirus, Merbecovirus, or Sarbecovirus. In some embodiments, a circular polyribonucleotide comprises Betacoronavirus immunogens and/or epitopes. In some embodiments, a circular polyribonucleotide comprises Sarbecovirus immunogens and/or epitopes. In some embodiments, a circular polyribonucleotide comprises Merbecovirus immunogens and/or epitopes.

[0112] In some embodiments, the circular polyribonucleotide comprises immunogens and/or epitopes from a genus or subgenus of the omicron coronavirus variant (B.1.1.529. In some embodiments, the omicron coronavirus variant may be of the sublineage of BA.2, BA.2.75, BA.4.1, BA.4.1.8, BA.4.6.1, BA.4.6.4, BA.5, BA.5.1, BA.5.1.12, BA.5.1.25, BA.5.10.1, BA.5.2, BA.5.2.1, BA.5.2.6, BA.5.3, BA.5.3.1, BA.5.3.5, BA. 5.5., BA 5.6, BA.5.6.1, BA.5.7, BE.1.1, BF.10, BF.16, BF.31, BF.31.1, BF.7, BQ.1, BQ.1.1, BQ.1.8, XBB, or XBB.1.

[0113] In some embodiments, a circular polyribonucleotide comprises a sequence for an immunogen from a coronavirus that is a biosafety level 2 (BSL-2) pathogen). In some embodiments, a circular polyribonucleotide comprises a sequence from a coronavirus that is a biosafety level 3 (BSL-3) pathogen. In some embodiments, the coronavirus is a biosafety level 4 pathogen (BSL-4). In some embodiments, no approved drugs (e.g., antiviral or antibiotic drugs) are available to treat infection with the coronavirus from which the immunogen expressed by the circular polyribonucleotide is derived. In some embodiments, no approved vaccines are available to prevent or reduce the risk of infection with the coronavirus from which the immunogen expressed by the circular polyribonucleotide is derived.

[0114] An immunogen and/or epitope can be from a coronavirus surface protein, a coronavirus membrane protein, a coronavirus envelope protein, a coronavirus capsid protein, a coronavirus nucleocapsid protein, a coronavirus spike protein, a coronavirus receptor binding domain (RBD) of a spike protein, a coronavirus entry protein, a coronavirus membrane fusion protein, a coronavirus structural protein, a coronavirus non-structural protein, a coronavirus regulatory protein, a coronavirus accessory protein, a secreted coronavirus protein, a coronavirus polymerase protein, a coronavirus RNA polymerase, a coronavirus protease, a coronavirus glycoprotein, a coronavirus fusogen, a coronavirus helical capsid protein, a coronavirus icosahedral capsid protein, a coronavirus matrix protein, a coronavirus replicase, a coronavirus transcription factor, or a coronavirus enzyme.

[0115] Immunogens and/or epitopes from any number of coronaviruses are expressed by the circular polyribonucleotide. In some cases, the immunogens and/or epitopes are associated with or expressed by one coronavirus disclosed herein. In some embodiments, the immunogens and/or epitopes are associated with or expressed by two or more coronaviruses disclosed herein.

[0116] In some cases, two or more coronaviruses are phenotypically related. For example, compositions and methods of the disclosure can utilize immunogens and/or epitopes from two or more coronaviruses that are respiratory pathogens, two or more coronaviruses that are associated with severe disease, two or more coronaviruses that are associated with adverse outcomes in immunocompromised subjects (e.g., subjects for immunization), two or more coronaviruses that are associated with acute respiratory distress syndrome (ARDS), two or more coronaviruses that are associated with severe acute respiratory syndrome (SARS), two or more coronaviruses that are associated with middle eastern respiratory syndrome (MERS), or a combination thereof.

[0117] A circular polyribonucleotide can comprise or encode, for example, immunogens and/or epitopes from at least 1, at least 2, at least 3, at least 4, at least 5, at least 6, at least 7, at least 8, at least 9, at least 10, at least 15, at least 20, at least 25, at least 30, at least 40, at least 50, at least 60, at least 70, at least 80, at least 90, at least 100, or more coronaviruses. In some embodiments, the circular polyribonucleotide includes or encodes for immunogens and/or epitopes from at least 1, at least 2, at least 3, at least 4, at least 5, at least 6, at least 7, at least 8, at least 9, at least 10, at least 15, at least 20, at least 25, at least 30, at least 40, at least 50, at least 60, at least 70, at least 80, at least 90, at least 100, or more targets other than a coronavirus (e.g., a virus other than a coronavirus, such as an influenza virus).

[0118] In some embodiments, a circular polyribonucleotide comprises or encodes immunogens and/or epitopes from at most 2, at most 3, at most 4, at most 5, at most 6, at most 7, at most 8, at most 9, at most 10, at most 15, at most 20, at most 25, at most 30, at most 40, at most 50, at most 60, at most 70, at most 80, at most 90, at most 100, or less coronaviruses. In some embodiments, the circular polyribonucleotide includes or encodes for immunogens and/or epitopes from at most 2, at most 3, at most 4, at most 5, at most 6, at most 7, at most 8, at most 9, at most 10, at most 15, at most 20, at most 25, at most 30, at most 40, at most 50, at most 60, at most 70, at most 80, at most 90, at most 100, or less targets other than a coronavirus (e.g., a virus other than a coronavirus, such as an influenza virus).

[0119] In some embodiments, a circular polyribonucleotide comprises or encodes immunogens and/or epitopes from about 1, 2, 3, 4, 5, 6, 7, 8, 9, 10, 15, 20, 25, 30, 40, 50, 60, 70, 80, 90, or 100, coronaviruses. In some embodiments, a circular polyribonucleotide comprises or encodes immunogens and/or epitopes from about 1, 2, 3, 4, 5, 6, 7, 8, 9, 10, 15, 20, 25, 30, 40, 50, 60, 70, 80, 90, or 100, targets other than a coronavirus (e.g., a virus other than a coronavirus, such as an influenza virus).

[0120] In some embodiments, an immunogen and/or epitope is from a coronavirus, for example, a severe acute respiratory syndrome associated coronavirus (SARS-CoV, e.g., SARS-CoV-1, SARS-CoV-2), a Middle East respiratory syndrome coronavirus (MERS-CoV), or another coronavirus. In some embodiments, an immunogen and/or epitope of the disclosure is from a predicted open reading frame from a coronavirus genome.

[0121] New SARS isolates may be identified by a percent homology of 99%, 98%, 97%, 95%, 92%, 90%, 85%, or 80% homology of the polynucleotide sequence for specific genomic regions for the new virus with the polynucleotide sequence for specific genomic regions of the known SARS viruses. Additionally, new SARS isolates may be identified by a percent homology of 99%, 98%, 97%, 95%, 92%, 90%, 85%, or 80% homology of the polypeptide sequence encoded by the polynucleotide of specific genomic regions of the new SARS virus to the polypeptide sequence encoded by the polynucleotides of specific regions of the known SARS virus. These genomic regions may include regions (e.g., gene products or ORFs) which are typically in common among numerous coronaviruses, as well as group specific regions (e.g., immunogenic groups), such as, for example, any one of the following genomic regions which could be readily identified by a virologist skilled in the art: 5′ untranslated region (UTR), leader sequence, ORF1a, ORF1 b, nonstructural protein 2 (NS2), hemagglutinin-esterase glycoprotein (HE) (also referred to as E3), spike glycoprotein (S) (also referred to as E2), ORF3a, ORF3b, nonstructural protein 4 (NS4), envelope (small membrane) protein (E) (also referred to as sM), membrane glycoprotein (M) (also referred to as E1), ORF5a, ORF5b, nucleocapsid phosphoprotein (N), ORF6, ORF7a, ORF7b, ORF8, ORF8a, ORF8b, ORF9a, ORF9b, ORF10, intergenic sequences, receptor binding domain (RBD) of a spike protein, 3′UTR, or RNA dependent RNA polymerase (pol). The SARS virus may have identifiable genomic regions with one or more the above-identified genomic regions. A SARS viral immunogen includes a protein encoded by any one of these genomic regions. A SARS viral immunogen may be a protein or a fragment thereof, which is highly conserved with coronaviruses. A SARS viral immunogen may be a protein or fragment thereof, which is specific to the SARS virus (as compared to known coronaviruses).

[0122] In some embodiments, an immunogen and/or epitope of the disclosure is from a predicted transcript from a SARS-CoV genome. In some embodiments, an immunogen and/or epitope of the disclosure is from a protein encoded by an open reading frame from a SARS-CoV genome. Non-limiting examples of open reading frames in SARS-CoV genomes can include ORF1a, ORF1 b, spike (S), ORF3a, ORF3b, envelope (E), membrane (M), ORF6, ORF7a, ORF7b, ORF8, ORF8a, ORF8b, ORF9a, ORF9b, nucleocapsid (N), and ORF10.

[0123] ORF1a and ORF1 b encode 16 non-structural proteins (nsp), for example, nsp1, nsp2, nsp3, nsp4, nsp5, nsp6, nsp7, nsp8, nsp9, nsp10, nsp11, nsp12, nsp13, nsp14, nsp15, and nsp16. Nonstructural proteins, for example, contribute to viral replication, viral assembly, immune response modulation, or a combination thereof. In some embodiments, the immunogen is a non-structural protein or is an immunogenic sequence encoding a non-structural protein. In some embodiments, epitopes are from a coronavirus non-structural protein.

[0124] Spike (S) encodes a spike protein, which in some embodiments contributes to binding to a host cell receptor, fusion of the virus with the host cell membrane, entry of the virus into a host cell, or a combination thereof. Spike protein can be an immunogen. In some embodiments, epitopes of the disclosure are from a spike protein. In some embodiments, epitopes of the disclosure comprise a receptor binding domain of a Spike protein. In some embodiments, epitopes of the disclosure comprise an ACE2 binding domain of a Spike protein.

[0125] Envelope (E) encodes envelope protein, which in some embodiments contributes to virus assembly and morphogenesis. Envelope protein can be an immunogen. In some embodiments, epitopes of the disclosure are from a coronavirus envelope protein.

[0126] Membrane (M) encodes membrane protein, which in some embodiments contributes to viral assembly. Membrane protein can be an immunogen. In some embodiments, epitopes of the disclosure are from a coronavirus membrane protein.

[0127] Nucleocapsid (N) encodes nucleocapsid protein, which in some embodiments can form complexes with genomic RNA and contribute to viral assembly, and/or interact with M protein.

[0128] Nucleocapsid protein can be an immunogen. In some embodiments, epitopes of the disclosure are from a coronavirus nucleocapsid protein.

[0129] ORF3a, ORF3b, ORF6, ORF7a, ORF7b, ORF8, ORF8a, ORF8b, ORF9a, ORF9b, and ORF10 encodes accessory proteins. In some embodiments, accessory proteins can modulate host cell signaling, modulate host cell immune responses, be incorporated into mature virions as minor structural proteins, or a combination thereof. An accessory protein can be an immunogen. In some embodiments, epitopes of the disclosure are from a coronavirus accessory protein.

[0130] Compositions and methods of the disclosure can utilize immunogens and/or epitopes that are encoded by or derived from one or more open reading frames of a SARS-CoV genome. For example, immunogens and/or epitopes can be encoded by or derived from ORF a, ORF b, spike (S), ORF3a, ORF3b, envelope (E), membrane (M), ORF6, ORF7a, ORF7b, ORF8, ORF8a, ORF8b, ORF9a, ORF9b, nucleocapsid (N), ORF10, or any combination thereof.

[0131] In some embodiments, epitopes of the disclosure are from a spike protein. In some embodiments, the epitopes of the disclosure are from the omicron coronavirus spike protein. The omicron coronavirus spike protein has an amino acid sequence of SEQ ID NO: 283. In some embodiments, epitopes of the disclosure comprise a receptor binding domain (RBD) of a Spike protein. In some embodiments, epitopes of the disclosure comprise an ACE2 binding domain of a Spike protein. In some embodiments, epitopes of the disclosure comprise an S1 subunit Spike protein, an S2 subunit of spike protein, or a combination thereof. In some embodiments, epitopes of the disclosure comprise an ectodomain of a spike protein. In some embodiments, an epitope of the disclosure comprises Gln498, Thr500, Asn501, or a combination thereof from a coronavirus spike protein. In some embodiments, an epitope of the disclosure comprises Lys417, Tyr453, or a combination thereof from a coronavirus spike protein. In some embodiments, an epitope of the disclosure comprises Gln474, Phe486, or a combination thereof from a coronavirus spike protein. In some embodiments, an epitope of the disclosure comprises Gln498, Thr500, Asn501, Lys417, Tyr453, Gln474, Phe486, one or more equivalent amino acids from a spike protein variant or derivative, or a combination thereof from a coronavirus spike protein. In some embodiments, the spike protein of the disclosure comprises a D614G mutation, namely having an amino acid glycine (G) at the 614 position instead of aspartic acid (D). In some embodiments, an epitope of the disclosure comprises Gly614 from a spike protein variant or derivative, or combination thereof from a coronavirus spike protein. In some cases, the D614G mutation can lead to reduction of S1 shedding and increase in the infectivity of the coronavirus. In some embodiments, the spike protein of the disclosure comprises may include one or more of a T19I, L24del, P25del, P26del, A27S, H69del, V70del, V213G, G229D, R346T, S371F, S373P, S375F, T376A, D405N, R408S, K417N, N440K, K444T, L452R, N460K, S477N, T478K, E484A, F486V, Q498R, N501Y, Y505H, D614G, H655Y, N679K, P681H, N764K, D796Y, Q954H, N969K, Y144del, P251 L, and S256 L mutations in comparison to the wildtype spike protein. In some embodiments, the spike protein of the disclosure comprises may include the mutations T19I, L24del, P25del, P26del, A27S, H69del, V70del, V213G, G229D, R346T, S371F, S373P, S375F, T376A, D405N, R408S, K417N, N440K, K444T, L452R, N460K, S477N, T478K, E484A, F486V, Q498R, N501Y, Y505H, D614G, H655Y, N679K, P681H, N764K, D796Y, Q954H, N969K, Y144del, P251 L, and S256 L in comparison to the wildtype spike protein. In some embodiments, the spike protein of the disclosure comprises may include one or more of a T19I, L24del, P25del, P26del, A27S, G142D, K147E, W152R, F157 L, I210V, V213G, G257S, G339H, R346T, K356T, S371F, S373P, T376A, D405N, R408S, K417N, N440K, G446S, N460K, S477N, T478K, E484A, F486S, F490S, Q498R, N501Y, Y505H, D574V, D614G, H655Y, N679K, P681H, N764K, D796Y, Q954H, N969K, D1199N, M177T, N185D, N211del, L212I, K444T, N450D, L452R, F486P, F4861, S494P, and H1101Y mutations in comparison to the wildtype spike protein. In some embodiments, the spike protein of the disclosure comprises may include the mutations T19I, L24del, P25del, P26del, A27S, G142D, K147E, W152R, F157 L, 1210V, V213G, G257S, G339H, R346T, K356T, S371F, S373P, T376A, D405N, R408S, K417N, N440K, G446S, N460K, S477N, T478K, E484A, F486S, F490S, Q498R, N501Y, Y505H, D574V, D614G, H655Y, N679K, P681H, N764K, D796Y, Q954H, N969K, D1199N, M177T, N185D, N211del, L212I, K444T, N450D, L452R, F486P, F4861, S494P, and H1101Y in comparison to the wildtype spike protein.

[0132] In some embodiments, the spike protein of the disclosure comprises may include one or more of a T19I, L24del, P25del, P26del, A27S, H69del, V70del, G142D, Y144del, V213G, G339D, S371F, S373P, S375F, T376A, D405N, R408S, K417N, N440K, K444T, L452R, N460K, S477N, T478K, E484A, F486V, Q498R, N501Y, Y505H, D614G, H655Y, N679K, P681H, N764K, D796Y, Q954H, and N969K, and P251H mutations in comparison to the wildtype spike protein. In some embodiments, the spike protein of the disclosure comprises may include the mutations T19I, L24del, P25del, P26del, A27S, H69del, V70del, G142D, Y144del, V213G, G339D, S371F, S373P, S375F, T376A, D405N, R408S, K417N, N440K, K444T, L452R, N460K, S477N, T478K, E484A, F486V, Q498R, N501Y, Y505H, D614G, H655Y, N679K, P681H, N764K, D796Y, Q954H, and N969K in comparison to the wildtype spike protein.

[0133] In some embodiments, the spike protein of the disclosure comprises may include one or more of a T19I, L24del, P25del, P26del, A27S, V83A, G142D, Y144del, H146Q, Q183E, V213E, G252V, G339H, R346T, L368I, S371F, S373P, S375F, T376A, D405N, R408S, K417N, N440K, V445P, G446S, N460K, S477N, T478K, E484A, F486S, F490S, Q498R, N501Y, Y505H, D614G, H655Y, N679K, P681H, N764K, D796Y, Q954H, N969K, and H146K mutations in comparison to the wildtype spike protein. In some embodiments, the spike protein of the disclosure comprises may include the mutations T19I, L24del, P25del, P26del, A27S, V83A, G142D, Y144del, H146Q, Q183E, V213E, G252V, G339H, R346T, L368I, S371F, S373P, S375F, T376A, D405N, R408S, K417N, N440K, V445P, G446S, N460K, S477N, T478K, E484A, F486S, F490S, Q498R, N501Y, Y505H, D614G, H655Y, N679K, P681H, N764K, D796Y, Q954H, N969K, and H146K in comparison to the wildtype spike protein.

[0134] In some embodiments, immunogens and/or epitopes are encoded by or derived from ORF a. In some embodiments, immunogens and/or epitopes are encoded by or derived from a SARS-CoV ORF b. In some embodiments, immunogens and/or epitopes are encoded by or derived from a SARS-CoV spike. In some embodiments, immunogens and/or epitopes are encoded by or derived from a SARS-CoV ORF3a. In some embodiments, immunogens and/or epitopes are encoded by or derived from a SARS-CoV ORF3b. In some embodiments, immunogens and/or epitopes are encoded by or derived from a SARS-CoV envelope (E). In some embodiments, immunogens and/or epitopes are encoded by or derived from a SARS-CoV membrane (M). In some embodiments, immunogens and/or epitopes are encoded by or derived from a SARS-CoV ORF6. In some embodiments, immunogens and/or epitopes are encoded by or derived from a SARS-CoV ORF7a. In some embodiments, immunogens and/or epitopes are encoded by or derived from a SARS-CoV ORF7b. In some embodiments, immunogens and/or epitopes are encoded by or derived from a SARS-CoV ORF8. In some embodiments, immunogens and/or epitopes are encoded by or derived from a SARS-CoV ORF8a. In some embodiments, immunogens and/or epitopes are encoded by or derived from a SARS-CoV ORF9a. In some embodiments, immunogens and/or epitopes are encoded by or derived from a SARS-CoV ORF9b. In some embodiments, immunogens and/or epitopes are encoded by or derived from a SARS-CoV nucleocapsid (N). In some embodiments, immunogens and/or epitopes are encoded by or derived from a SARS-CoV ORF10. In some embodiments, immunogens and/or epitopes are encoded by or derived from a SARS-CoV spike (S), envelope (E), membrane (M), and nucleocapsid (N).

[0135] In some embodiments, immunogens and/or epitopes are not encoded by or derived from a SARS-CoV ORF a. In some embodiments, immunogens and/or epitopes are not encoded by or derived from a SARS-CoV ORF b. In some embodiments, immunogens and/or epitopes are not encoded by or derived from a SARS-CoV spike. In some embodiments, immunogens and/or epitopes are not encoded by or derived from a SARS-CoV ORF3a. In some embodiments, immunogens and/or epitopes are not encoded by or derived from a SARS-CoV ORF3b. In some embodiments, immunogens and/or epitopes are not encoded by or derived from a SARS-CoV envelope (E). In some embodiments, immunogens and/or epitopes are not encoded by or derived from a SARS-CoV membrane (M). In some embodiments, immunogens and/or epitopes are not encoded by or derived from a SARS-CoV ORF6. In some embodiments, immunogens and/or epitopes are not encoded by or derived from a SARS-CoV ORF7a. In some embodiments, immunogens and/or epitopes are not encoded by or derived from a SARS-CoV ORF7b. In some embodiments, immunogens and/or epitopes are not encoded by or derived from a SARS-CoV ORF8. In some embodiments, immunogens and/or epitopes are not encoded by or derived from a SARS-CoV ORF8a. In some embodiments, immunogens and/or epitopes are not encoded by or derived from a SARS-CoV ORF9a. In some embodiments, immunogens and/or epitopes are not encoded by or derived from a SARS-CoV ORF9b. In some embodiments, immunogens and/or epitopes are not encoded by or derived from a SARS-CoV nucleocapsid (N). In some embodiments, immunogens and/or epitopes are not encoded by or derived from a SARS-CoV ORF10. In some embodiments, immunogens and/or epitopes are not encoded by or derived from a SARS-CoV spike (S), envelope (E), membrane (M), and nucleocapsid (N).

[0136] An immunogen and/or epitope can be encoded by or derived from SARS-CoV2.

[0137] A non-limiting example of a SARS-CoV-2 genome is provided in DB Source accession MN908947.3, the complete genome sequence of a SARS-CoV2 isolate, the content of which is incorporated herein by reference in its entirety. DB Source accession MN908947.3: 21563-25384 corresponds to the S protein, the content of which is incorporated herein by reference in its entirety. A non-limiting example of a SARS-CoV-2 spike protein is provided in GenBank Sequence: QHD43416.1, the sequence of a spike protein of a Severe acute respiratory syndrome coronavirus 2 isolate, the content of which is incorporated herein by reference in its entirety A non-limiting example of a SARS-CoV-2 genome is provided in sequence NCBI Reference Sequence accession number NC_045512, version NC_045512.2, the complete genome sequence of SARS-CoV2 isolate Wuhan-Hu-1, the content of which is incorporated herein by reference in its entirety.

[0138] A non-limiting example of a SARS-CoV-2 genome is provided in sequence NCBI Reference Sequence accession number MW450666, the complete genome sequence of SARS-CoV2 isolate, the content of which is incorporated herein by reference in its entirety.

[0139] A non-limiting example of a SARS-CoV-2 genome is provided in sequence NCBI Reference Sequence accession number MW487270, the complete genome sequence of SARS-CoV2 lineage B.1.1.7 virus, the content of which is incorporated herein by reference in its entirety.

[0140] A non-limiting example of a SARS-CoV-2 genome is provided in sequence GISAID Reference Sequence accession number EPI_-SL_10894052-EPI_ISL_10894090, the complete genome sequence of severe acute respiratory syndrome coronavirus 2, the content of which is incorporated herein by reference in its entirety.

[0141] A non-limiting example of a SARS-CoV-2 genome is provided in sequence GISAID Reference Sequence accession number EPI_ISL_792683, the complete genome sequence of SARS-CoV2 lineage P.1 virus, the content of which is incorporated herein by reference in its entirety.

[0142] A non-limiting example of a SARS-CoV-2 genome is provided in sequence GISAID Reference Sequence accession number EPI_ISL_678615, the complete genome sequence of SARS-CoV2 lineage B.1.351 virus, the content of which is incorporated herein by reference in its entirety.

[0143] Non-limiting examples of a SARS-CoV-2 genome are provided in sequence NCBI Reference Sequence accession numbers MW972466-MW974550, the complete genome sequence of SARS-CoV2 lineage B.1.427 and B.1.429 virus, the contents of which are incorporated herein by reference in their entirety.

[0144] Non-limiting examples of a SARS-CoV-2 genome are provided in sequence NCBI Reference Sequence accession numbers MZ156756-MZ226428, the complete genome sequence of SARS-CoV2 virus, the contents of which are incorporated herein by reference in their entirety.

[0145] In some embodiments, the SAR-CoV-2 genome is provided in the GISAID Database at www.gisaid.org. In some embodiments, the SARS-CoV-2 genome is provided in the International Nucleotide Sequence Database Collaboration (INSDC) at www.insdc.org.

[0146] In some embodiments, an immunogen and/or epitope of the disclosure is from a predicted transcript from a SARS-CoV-2 genome. In some embodiments, an immunogen and/or epitope of the disclosure is from a protein encoded by an open reading frame from a SARS-CoV-2 genome, or a derivative thereof. Non-limiting examples of open reading frames in the SARS-CoV-2 genome include ORF1a, ORF1b, spike (S), ORF3a, envelope (E), membrane (M), ORF6, ORF7a, ORF7b, ORF8, nucleocapsid (N), and ORF10. In some embodiments, a SARS-Co V-2 genome encodes an ORF3b, ORF9a, ORF9b, or a combination thereof. In some embodiments, a SARS-CoV-2 genome does not encode an ORF3b, ORF9a, ORF9b, or any combination thereof.

[0147] Nonlimiting examples of amino acid sequences are provided in TABLE 1. In some embodiments, the immunogen comprises a sequence having at least about 80%, 85%, 90%, 95%, 97%, 98%, 99%, or 100% sequence identity to a sequence from TABLE 1.

TABLE 1
Examples of amino acid sequence of proteins encoded by a SARS-CoV-2 genome.

| SEQ ID | | |
|---|---|---|
| NO: | Description | Sequence |
| 1 | Spike (S) protein | MFVFLVLLPLVSSQCVNLTTRTQLPPAYTNSFTRGVYYPDKVFRSSV |
| | | LHSTQDLFLPFFSNVTWFHAIHVSGTNGTKRFDNPVLPFNDGVYFAS |
| | | TEKSNIIRGWIFGTTLDSKTQSLLIVNNATNVVIKVCEFQFCNDPFLGV |
| | | YYHKNNKSWMESEFRVYSSANNCTFEYVSQPFLMDLEGKQGNFKN |
| | | LREFVFKNIDGYFKIYSKHTPINLVRDLPQGFSALEPLVDLPIGINITRF |
| | | QTLLALHRSYLTPGDSSSGWTAGAAAYYVGYLQPRTFLLKYNENGTI |
| | | TDAVDCALDPLSETKCTLKSFTVEKGIYQTSNFRVQPTESIVRFPNIT |
| | | NLCPFGEVFNATRFASVYAWNRKRISNCVADYSVLYNSASFSTFKCY |
| | | GVSPTKLNDLCFTNVYADSFVIRGDEVRQIAPGQTGKIADYNYKLPD |
| | | DFTGCVIAWNSNNLDSKVGGNYNYLYRLFRKSNLKPFERDISTEIYQ |
| | | AGSTPCNGVEGFNCYFPLQSYGFQPTNGVGYQPYRVVVLSFELLHA |
| | | PATVCGPKKSTNLVKNKCVNFNFNGLTGTGVLTESNKKFLPFQQFG |
| | | RDIADTTDAVRDPQTLEILDITPCSFGGVSVITPGTNTSNQVAVLYQD |
| | | VNCTEVPVAIHADQLTPTWRVYSTGSNVFQTRAGCLIGAEHVNNSY |
| | | ECDIPIGAGICASYQTQTNSPRRARSVASQSIIAYTMSLGAENSVAYS |
| | | NNSIAIPTNFTISVTTEILPVSMTKTSVDCTMYICGDSTECSNLLLQYG |
| | | SFCTQLNRALTGIAVEQDKNTQEVFAQVKQIYKTPPIKDFGGFNFSQI |
| | | LPDPSKPSKRSFIEDLLFNKVTLADAGFIKQYGDCLGDIAARDLICAQK |
| | | FNGLTVLPPLLTDEMIAQYTSALLAGTITSGWTFGAGAALQIPFAMQM |
| | | AYRFNGIGVTQNVLYENQKLIANQFNSAIGKIQDSLSSTASALGKLQD |
| | | VVNQNAQALNTLVKQLSSNFGAISSVLNDILSRLDKVEAEVQIDRLITG |
| | | RLQSLQTYVTQQLIRAAEIRASANLAATKMSECVLGQSKRVDFCGKG |
| | | YHLMSFPQSAPHGVVFLHVTYVPAQEKNFTTAPAICHDGKAHFPRE |
| | | GVFVSNGTHWFVTQRNFYEPQIITTDNTFVSGNCDVVIGIVNNTVYD |
| | | PLQPELDSFKEELDKYFKNHTSPDVDLGDISGINASVVNIQKEIDRLN |
| | | EVAKNLNESLIDLQELGKYEQYIKWPWYIWLGFIAGLIAIVMVTIMLCC |
| | | MTSCCSCLKGCCSCGSCCKFDEDDSEPVLKGVKLHYT |
| 2 | Envelope (E) | MYSFVSEETGTLIVNSVLLFLAFVVFLLVTLAILTALRLCAYCCNIVNVS |
| | protein | LVKPSFYVYSRVKNLNSSRVPDLLV |
| 3 | Membrane (M) | MADSNGTITVEELKKLLEQWNLVIGFLFLTWICLLQFAYANRNRFLYII |
| | protein | KLIFLWLLWPVTLACFVLAAVYRINWITGGIAIAMACLVGLMWLSYFIA |
| | | SFRLFARTRSMWSFNPETNILLNVPLHGTILTRPLLESELVIGAVILRG |
| | | HLRIAGHHLGRCDIKDLPKEITVATSRTLSYYKLGASQRVAGDSGFAA |
| | | YSRYRIGNYKLNTDHSSSSDNIALLVQ |
| 4 | Nucleocapsid (N) | MSDNGPQNQRNAPRITFGGPSDSTGSNQNGERSGARSKQRRPQG |
| | protein | LPNNTASWFTALTQHGKEDLKFPRGQGVPINTNSSPDDQIGYYRRA |
| | | TRRIRGGDGKMKDLSPRWYFYYLGTGPEAGLPYGANKDGIIWVATE |
| | | GALNTPKDHIGTRNPANNAAIVLQLPQGTTLPKGFYAEGSRGGSQAS |
| | | SRSSSRSRNSSRNSTPGSSRGTSPARMAGNGGDAALALLLLDRLN |
| | | QLESKMSGKGQQQQGQTVTKKSAAEASKKPRQKRTATKAYNVTQA |
| | | FGRRGPEQTQGNFGDQELIRQGTDYKHWPQIAQFAPSASAFFGMS |
| | | RIGMEVTPSGTWLTYTGAIKLDDKDPNFKDQVILLNKHIDAYKTFPPT |
| | | EPKKDKKKKADETQALPQRQKKQQTVTLLPAADLDDFSKQLQQSMS |
| | | SADSTQA |
| 5 | ORF3a | MDLFMRIFTIGTVTLKQGEIKDATPSDFVRATATIPIQASLPFGWLIVG |
| | accessory protein | VALLAVFQSASKIITLKKRWQLALSKGVHFVCNLLLLFVTVYSHLLLVA |
| | | AGLEAPFLYLYALVYFLQSINFVRIIMRLWLCWKCRSKNPLLYDANYF |
| | | LCWHTNCYDYCIPYNSVTSSIVITSGDGTTSPISEHDYQIGGYTEKWE |
| | | SGVKDCVVLHSYFTSDYYQLYSTQLSTDTGVEHVTFFIYNKIVDEPEE |
| | | HVQIHTIDGSSGVVNPVMEPIYDEPTTTTSVPL |
| 6 | ORF6 accessory | MFHLVDFQVTIAEILLIIMRTFKVSIWNLDYIINLIIKNLSKSLTENKYSQL |
| | protein | DEEQPMEID |
| 7 | ORF7a | MKIILFLALITLATCELYHYQECVRGTTVLLKEPCSSGTYEGNSPFHPL |
| | accessory protein | ADNKFALTCFSTQFAFACPDGVKHVYQLRARSVSPKLFIRQEEVQEL |
| | | YSPIFLIVAAIVFITLCFTLKRKTE |
| 8 | ORF7b | MIELSLIDFYLCFLAFLLFLVLIMLIIFWFSLELQDHNETCHA |
| | accessory protein | |
| 9 | ORF8 accessory | MKFLVFLGIITTVAAFHQECSLQSCTQHQPYVVDDPCPIHFYSKWYIR |
| | protein | VGARKSAPLIELCVDEAGSKSPIQYIDIGNYTVSCLPFTINCQEPKLGS |
| | | LVVRCSFYEDFLEYHDVRVVLDFI |
| 10 | ORF10 | MGYINVFAFPFTIYSLLLCRMNSRNYIAQVDVVNFNLT |
| | accessory protein | |

[0148] Additional non-limiting examples of proteins encoded by a SARS-CoV-2 genome include those with the contents of NCBI accession numbers MT334522, MT334523, MT334524, MT334525, MT334526, MT334527, MT334528, MT334529, MT334530, MT334531, MT334532, MT334533, MT334534, MT334535, MT334536, MT334537, MT334538, MT334539, MT334540, MT334541, MT334542, MT334543, MT334544, MT334545, MT334546, MT334555, MT334547, MT334548, MT334549, MT334550, MT334551, MT334552, MT334553, MT334554, MT334556, MT334557, MT334558, MT334559, MT334560, MT334561, MT334562, MT334563, MT334564, MT334565, MT334566, MT334567, MT334568, MT334569, MT334570, MT334571, MT334572, MT334573, MT326097, MT326106, MT326107, MT326116, MT326117, MT326124, MT326125, MT326126, MT326127, MT326134, MT326135, MT326136, MT326137, MT326138, MT326139, MT326140, MT326141, MT326142, MT326143, MT326144, MT326145, MT326146, MT326148, MT326149, MT326150, MT326151, MT326152, MT326158, MT326159, MT326160, MT326161, MT326162, MT326168, MT326169, MT326170, MT326171, MT326172, MT326178, MT326179, MT326180, MT326181, MT326182, MT326183, MT326188, MT326189, MT326190, MT326191, MT326129, MT326121, MT326120, MT326119, MT326118, MT326111, MT326023, MT326025, MT326033, MT326035, MT326036, MT326040, MT326043, MT326045, MT326053, MT326055, MT326056, MT326063, MT326066, MT326070, MT326071, MT326072, MT326075, MT326076, MT326078, MT326079, MT326089, MT325563, MT325565, MT325566, MT326155, MT326163, MT326177, MT326130, MT326128, MT326110, MT326109, MT326108, MT326101, MT326100, MT326099, MT326098, MT326094, MT326093, MT326092, MT325568, MT325569, MT325590, MT325640, MT325606, MT325607, MT325608, MT325609, MT325610, MT325611, MT325616, MT325618, MT325619, MT325620, MT325622, MT325623, MT325624, MT325599, MT325600, MT325601, MT325602, MT325612, MT325613, MT325615, MT325617, MT325625, MT324062, MT324684, MT325573, MT325574, MT325577, MT325579, MT325586, MT325592, MT325593, MT325594, MT325598, MT325605, MT325626, MT325627, MT325633, MT325634, MT326028, MT326031, MT326091, MT326090, MT326085, MT326084, MT326083, MT326082, MT326081, MT326080, MT326077, MT326067, MT326057, MT326024, MT326026, MT326027, MT326032, MT326034, MT326037, MT326039, MT326041, MT326042, MT326044, MT326046, MT326047, MT326049, MT326050, MT326051, MT326052, MT326054, MT326059, MT326060, MT326061, MT326062, MT326064, MT326065, MT326068, MT326069, MT326073, MT326074, MT326088, MT327745, MT324679, MT325561, MT325571, MT325572, MT325575, MT325583, MT325587, MT325588, MT325589, MT325596, MT325597, MT325603, MT325604, MT325614, MT325621, MT325629, MT325630, MT325631, MT325632, MT325635, MT325636, MT325637, MT325638, MT325639, MT326086, MT326096, MT326102, MT326104, MT326105, MT326112, MT326113, MT326114, MT326115, MT326122, MT328034, MT325564, MT325567, MT326164, MT326165, MT326173, MT326174, MT326184, MT326185, MT326186, MT326187, MT325584, MT325585, MT326087, MT326095, MT326103, MT326123, MT326131, MT326132, MT326133, MT328033, MT325562, MT326147, MT326153, MT326154, MT326156, MT326157, MT326166, MT326167, MT326175, MT326176, MT324680, MT325570, MT325576, MT325578, MT325580, MT325581, MT325582, MT325591, MT325595, MT325628, MT326029, MT326030, MT326038, MT326048, MT326058, MT324681, MT324682, MT324683, MT328032, MT328035, MT322404, MT039874, MT322398, MT322409, MT322421, MT322423, MT322408, MT322413, MT322417, MT322394, MT322407, MT322418, MT322424, MT322411, MT077125, MT322395, MT322396, MT322397, MT322399, MT322400, MT322401, MT322402, MT322403, MT322405, MT322406, MT322414, MT322416, MT322419, MT322420, MT322410, MT322412, MT322415, MT322422, MT320538, MT320891, MT308692, MT308693, MT308695, MT308696, MT308698, MT308699, MT308701, MT308703, MT308704, MT308694, MT308697, MT308700, MT308702, MT293547, MT304476, MT304474, MT304475, MT304477, MT304478, MT304479, MT304481, MT304482, MT304484, MT304485, MT304486, MT304487, MT304488, MT304491, MT304480, MT304483, MT304489, MT304490, MT300186, MT292571, MT292576, MT292578, MT293186, MT292570, MT292573, MT293173, MT292575, MT293179, MT293180, MT293184, MT293189, MT293192, MT293193, MT293194, MT293201, MT293202, MT292572, MT292577, MT293185, MT293187, MT293188, MT291826, MT291832, MT291833, MT291835, MT291836, MT291831, MT293170, MT292574, MT293178, MT293181, MT293183, MT293195, MT293196, MT293197, MT293203, MT293204, MT293223, MT293212, MT293214, MT293215, MT293216, MT293219, MT293224, MT293225, MT293206, MT293208, MT293209, MT293221, MT295464, MT293160, MT293166, MT293171, MT293190, MT293161, MT293167, MT293168, MT293174, MT293175, MT293182, MT293191, MT293158, MT293162, MT293163, MT293164, MT293156, MT293157, MT293159, MT291834, MT291829, MT291827, MT291830, MT291828, MT293169, MT293200, MT293210, MT293211, MT293217, MT293218, MT295465, MT293198, MT293205, MT293207, MT293213, MT293220, MT293222, MT292581, MT292569, MT293172, MT293177, MT293176, MT293199, MT292580, MT292582, MT293165, MT292579, MT273658, MT281577, MT281530, MT276597, MT276598, MT276323, MT276328, MT276331, MT276329, MT276330, MT276324, MT276325, MT276327, MT276326, MT263388, MT263392, MT262900, MT262902, MT262906, MT262908, MT262912, MT262913, MT262914, MT262993, MT263074, MT263381, MT263391, MT262901, MT262903, MT262907, MT262909, MT262911, MT262899, MT262904, MT262915, MT262916, MT262897, MT262898, MT262905, MT262910, MT263400, MT263382, MT263383, MT263384, MT263385, MT262896, MT263407, MT263415, MT263406, MT263408, MT263422, MT263469, MT263439, MT263457, MT263459, MT263432, MT263450, MT263458, MT263467, MT263401, MT263411, MT263413, MT263426, MT263421, MT263443, MT263412, MT263416, MT263417, MT263423, MT263431, MT263461, MT263410, MT263424, MT263425, MT263427, MT263442, MT263402, MT263405, MT263409, MT263418, MT263419, MT263398, MT263399, MT263403, MT263404, MT263414, MT263430, MT263390, MT263434, MT263436, MT263446, MT263448, MT263452, MT263453, MT263456, MT263462, MT263463, MT263386, MT263387, MT263389, MT263428, MT263429, MT263433, MT263435, MT263437, MT263438, MT263440, MT263447, MT263449, MT263455, MT263444, MT263445, MT263451, MT263466, MT263420, MT263441, MT263454, MT263464, MT263465, MT263468, MT263460, MT263393, MT263394, MT263395, MT263396, MT263397, MT259226, MT259275, MT259276, MT259279, MT259247, MT258377, MT258378, MT258379, MT259231, MT259228, MT259238, MT259248, MT256917, MT259227, MT259236, MT256918, MT258380, MT259235, MT259237, MT259239, MT259281, MT259282, MT259283, MT259240, MT259243, MT259249, MT259250, MT259251, MT259256, MT259258, MT259266, MT259267, MT259274, MT259286, MT259287, MT259241, MT259242, MT258381, MT259257, MT259261, MT259262, MT259263, MT259264, MT259268, MT259269, MT259270, MT259271, MT259272, MT259273, MT259277, MT259278, MT259280, MT258383, MT258382, MT259246, MT256924, MT259244, MT259245, MT259252, MT259253, MT259254, MT259255, MT259259, MT259284, MT259229, MT259230, MT259265, MT259260, MT259285, LC534419, LC534418, MT253710, MT253709, MT253705, MT253708, MT253701, MT253702, MT253703, MT253704, MT253706, MT253707, MT251972, MT251974, MT251975, MT251973, MT251976, MT251979, MT253697, MT253699, MT253696, MT253698, MT253700, MT251977, MT251978, MT251980, MT246451, MT246461, MT246471, MT246472, MT246474, MT246483, MT246450, MT246453, MT246454, MT246462, MT246463, MT246464, MT246470, MT246473, MT246480, MT246484, MT246449, MT246455, MT246456, MT246478, MT246485, MT246488, MT246452, MT246460, MT246465, MT246481, MT246482, MT246490, MT246459, MT246468, MT246475, MT246477, MT246479, MT246457, MT246458, MT246466, MT246467, MT246469, MT246476, MT246486, MT246487, MT246489, MT233526, MT246667, MT240479, MT232870, MT232871, MT233523, MT232869, MT232872, MT233519, MT233521, MT233522, MT233520, MT226610, MT198653, MT198651, MT198652, MT192773, MT192758, MT192772, MT192765, MT192759, MT188341, MT188340, MT188339, MT186676, MT186681, MT186677, MT186678, MT187977, MT186680, MT186682, MT186679, MT184909, MT184911, MT184912, MT184913, MT184910, MT184907, MT184908, CADDYA000000000, MT163718, MT163719, MT163720, MT163714, MT163715, MT163721, MT163717, MT163737, MT163738, MT163712, MT163716, MT159706, MT159716, MT159719, MT159707, MT159717, MT159709, MT159715, MT159718, MT159722, MT159708, MT161607, MT159705, MT159710, MT159711, MT159712, MT159713, MT159714, MT159720, MT159721, MT121215, MT159778, MT066156, LC529905, MT050493, MT012098, MT152900, MT152824, MT135044, MT135042, MT135041, MT135043, MT126808, MT127113, MT127114, MT127116, MT127115, LC528232, LC528233, MT123293, MT123291, MT123290, MT123292, MT118835, MT111896, MT111895, MT106052, MT106053, MT106054, MT093571, MT093631, MT081061, MT081063, MT081066, MT081062, MT081064, MT081065, MT081067, MT081059, MT081060, MT081068, MT072667, MT072668, MT072688, MT066157, MT066176, MT066159, MT066175, MT066158, LC523809, LC523807, LC523808, MT044258, MT044257, MT050416, MT050417, MT042773, MT042774, MT042775, MT042776, MT049951, MT050414, MT050415, MT042777, MT042778, MT039887, MT039888, MT039890, MT039873, LC522350, MT027062, MT027063, MT027064, MT020881, MT019530, MT019531, MT019533, MT020880, MT019532, MT019529, MT020781, LR757995, LR757998, LR757996, LR757997, MT007544, MT008022, MT008023, MN996531, MN996530, MN996527, MN996528, MN996529, MN997409, MN988668, MN988669, MN994467, MN994468, MN988713, MN938384, MN975262, MN985325, MN938386, MN938388, MN938385, MN938387, MN938390, MN938389, MN975263, MN975267, MN975268, MN975265, MN975264, MN975266, MN970004, MN970003, MN908947, OL6728316.1 each of which is incorporated herein by reference in its entirety.

[0149] In particular embodiments, a circular polyribonucleotide comprises a SARS-CoV-2 immunogen described in TABLE 2. In some embodiments, the immunogen comprises a sequence having at least about 80%, 85%, 90%, 95%, 97%, 98%, 99%, or 100% sequence identity to a sequence from TABLE 2.

TABLE 2
Descriptions of constructs and SARS-CoV-2 ORFs

| | ORF (SEQ | ORF | Proline | Cloning | Circularization | |
|---|---|---|---|---|---|---|
| Construct | ID NO.) | Description | substitutions | optimization | optimization | IRES |
| p1 | 1 (13) | S protein | Yes | Yes | No | CVB3 |
| SEQ ID | | transmembrane | | | | |
| NO. 12 | | (TM) domain | | | | |
| | | completely | | | | |
| | | removed, and a | | | | |
| | | trimerization | | | | |
| | | domain added | | | | |
| p3 | 3 (15) | S protein | Yes | Yes | No | CVB3 |
| SEQ ID | | transmembrane | | | | |
| NO. 14 | | (TM) domain | | | | |
| | | fully intact | | | | |
| p5 | 5 (17) | S protein | Yes | Yes | No | CVB3 |
| SEQ ID | | transmembrane | | | | |
| NO. 16 | | (TM) domain | | | | |
| | | partially removed | | | | |
| | | (111 of 195 | | | | |
| | | nucleotides | | | | |
| | | were removed) | | | | |
| | | (nucleotides | | | | |
| | | 3709-3819 were | | | | |
| | | removed) | | | | |
| p7 | 7 (19) | S protein | Yes | Yes | Yes | CVB3 |
| SEQ ID | | transmembrane | | | | |
| NO. 18 | | (TM) domain | | | | |
| | | completely | | | | |
| | | removed, and a | | | | |
| | | trimerization | | | | |
| | | domain added | | | | |
| p9 | 9 (21) | S protein | Yes | Yes | Yes | CVB3 |
| SEQ ID | | transmembrane | | | | |
| NO. 20 | | (TM) domain | | | | |
| | | fully intact | | | | |
| p11 | 11 (23) | S protein | Yes | Yes | Yes | CVB3 |
| SEQ ID | | transmembrane | | | | |
| NO. 22 | | (TM) domain | | | | |
| | | partially removed | | | | |
| | | (111 of 195 | | | | |
| | | nucleotides | | | | |
| | | were removed) | | | | |
| | | (nucleotides | | | | |
| | | 3709-3819 were | | | | |
| | | removed) | | | | |
| p13 | 13 (25) | S protein | N/A | N/A | N/A | CVB3 |
| SEQ ID | | receptor binding | | | | |
| NO. 24 | | domain (RBD) | | | | |
| | | only with | | | | |
| | | secretion signal | | | | |
| | | translationally | | | | |
| | | fused to the 5′ | | | | |
| | | end | | | | |
| p15 | 3 (15) | S protein | Yes | Yes | N/A | EMCV |
| | | transmembrane | | | | |
| | | (TM) domain | | | | |
| | | completely | | | | |
| | | removed, and a | | | | |
| | | trimerization | | | | |
| | | domain added | | | | |
| p17 | 5 (17) | S protein | Yes | Yes | N/A | EMCV |
| | | transmembrane | | | | |
| | | (TM) domain | | | | |
| | | fully intact | | | | |
| p19 | 1 (13) | S protein | Yes | Yes | N/A | EMCV |
| | | transmembrane | | | | |
| | | (TM) domain | | | | |
| | | partially | | | | |
| | | removed (111 | | | | |
| | | of 195 | | | | |
| | | nucleotides | | | | |
| | | were removed) | | | | |
| | | (nucleotides | | | | |
| | | 3709-3819 were | | | | |
| | | removed) | | | | |
| p21 | 7 (19) | S protein | Yes | Yes | Yes | EMCV |
| | | transmembrane | | | | |
| | | (TM) domain | | | | |
| | | completely | | | | |
| | | removed, and a | | | | |
| | | trimerization | | | | |
| | | domain added | | | | |
| p23 | 9 (21) | S protein | Yes | Yes | Yes | EMCV |
| | | transmembrane | | | | |
| | | (TM) domain | | | | |
| | | fully intact | | | | |
| p25 | 11 (23) | S protein | Yes | Yes | Yes | EMCV |
| | | transmembrane | | | | |
| | | (TM) domain | | | | |
| | | partially removed | | | | |
| | | (111 of 195 | | | | |
| | | nucleotides | | | | |
| | | were removed) | | | | |
| | | (nucleotides | | | | |
| | | 3709-3819 were | | | | |
| | | removed) | | | | |
| p27 | 13 (25) | S protein | N/A | N/A | N/A | EMCV |
| | | receptor binding | | | | |
| | | domain (RBD) | | | | |
| | | only with | | | | |
| | | secretion signal | | | | |
| | | translationally | | | | |
| | | fused to the 5′ end | | | | |
| p33 | 33 (26) | S protein | N/A | N/A | N/A | EMCV |
| | | receptor binding | | | | |
| | | domain (RBD) | | | | |
| | | only with | | | | |
| | | secretion signal | | | | |
| | | translationally | | | | |
| | | fused to the 5′ | | | | |
| | | end and RBD | | | | |
| | | type II terminator | | | | |
| | | removed | | | | |
| p35 | 35 (27) | S protein | Yes | Yes | No | EMCV |
| | | transmembrane | | | | |
| | | (TM) domain | | | | |
| | | fully intact and | | | | |
| | | RBD type II | | | | |
| | | terminator removed | | | | |
| p36 | 36 (28) | S protein | Yes | Yes | Yes | EMCV |
| | | transmembrane | | | | |
| | | (TM) domain | | | | |
| | | fully intact and | | | | |
| | | RBD type II | | | | |
| | | terminator removed | | | | |
| p39 | 39 (29) | S protein | N/A | N/A | N/A | EMCV |
| | | transmembrane | | | | |
| | | (TM) domain | | | | |
| | | fully intact. GC | | | | |
| | | optimized | | | | |
| p41 | 41 (30) | S protein | N/A | N/A | N/A | EMCV |
| | | receptor binding | | | | |
| | | domain (RBD) | | | | |
| | | only with | | | | |
| | | secretion signal | | | | |
| | | translationally | | | | |
| | | fused to the 5′ | | | | |
| | | end and RBD | | | | |
| | | type II terminator | | | | |
| | | removed. GC | | | | |
| | | optimized | | | | |
| p44 | 44 (48) | S protein | N/A | N/A | N/A | EMCV |
| | | receptor binding | | | | |
| | | domain (RBD) | | | | |
| | | only with IL-2 | | | | |
| | | secretion signal | | | | |
| | | translationally | | | | |
| | | fused to the 5′ | | | | |
| | | end and RBD type | | | | |
| | | II terminator | | | | |
| | | removed | | | | |
| p45 | 45 (49) | S protein | N/A | N/A | N/A | EMCV |
| | | receptor binding | | | | |
| | | domain (RBD) | | | | |
| | | only with Gluc | | | | |
| | | secretion signal | | | | |
| | | translationally | | | | |
| | | fused to the 5′ | | | | |
| | | end and RBD | | | | |
| | | type II | | | | |
| | | terminator | | | | |
| | | removed | | | | |

[0150] In TABLE 2, “proline substitutions” denote proline substitutions at residues 986 and 987, as well as a “GSAS” substitution (SEQ ID NO: 336) at the furin cleavage site (residues 682-685). For “cloning optimization,” single base substitution was made at coordinate 2541 to destroy a Bsal site to assist in Golden Gate Cloning construction of the plasmid DNA template. For “circularization optimizations”: four single nucleotides—at positions 2307, 2790, 159 and 315—were substituted to destroy sites that could potentially bind circularization elements of splint nucleic acid sequences, thereby potentially inhibiting efficient ligation. For constructs that have type II terminator removed (e.g., p33, p35, p36, p39, p41, p44, and p45): two single nucleotides—at positions 1047, 1049 were substituted to destroy type II terminator site. For constructs that have GO optimization (e.g., p39 and p41), GO optimization was performed such that GO content was approximately 50%. All single base pair substitutions were designed to be translationally silent. Further, in TABLE 2, IRES is EMCV (SEQ ID NO: 31) or is CV1B3 (SEQ ID NO: 45).

[0151] In some embodiments, the circular polyribonucleotide includes an open reading frame encoding a SARS-CoV-2 immunogen having an amino acid sequence that is at least about 80% (e.g., about 81%, 82%, 83%, 84%, 85%, 86%, 87%, 88%, 89%, 90%, 91%, 92%, 93%, 94%, 95%, 96%, 97%, 98%, 99%, or 100%) identical to any one of SEQ ID NOs: 63-111 and 283-291. In some embodiments, the circular polyribonucleotide includes an open reading frame encoding a SARS-CoV-2 immunogen having an amino acid sequence that is at least about 90% (e.g., about 91%, 92%, 93%, 94%, 95%, 96%, 97%, 98%, 99%, or 100%) identical to any one of SEQ ID NOs: 63-111 and 283-291. In some embodiments, the circular polyribonucleotide includes an open reading frame encoding a SARS-CoV-2 immunogen having an amino acid sequence that is at least about 95% (e.g., about 96%, 97%, 98%, 99%, or 100%) identical to any one of SEQ ID NOs: 63-111 and 283-291. In some embodiments, the circular polyribonucleotide includes an open reading frame encoding a SARS-CoV-2 immunogen having an amino acid sequence that is any one of SEQ ID NOs: 63-111 and 283-291.

[0152] In some embodiments, the SARS-CoV-2 immunogen is an immunogenic fragment including a contiguous stretch of at least 100, 150, 200, 250, 300, 350, 400, 450, 500, 550, 600, 650, 700, 750, 800, 850, 900, 950, 1000, 1100, 1200, 1300, 1400, or 1500 amino acids of any one of SEQ ID NOs: 63-111 and 283-291. In some embodiments, the SARS-CoV-2 immunogen is an immunogenic fragment including a contiguous stretch of at least 50%, 60%, 70%, 80%, 90%, or 95% of the amino acids of a sequence any one of SEQ ID NOs: 63-111 and 283-291.

[0153] In particular embodiments, the circular polyribonucleotide includes an open reading frame with a nucleic acid sequence encoding a SARS-CoV-2 immunogen, wherein the nucleic acid sequence has at least about 80% (e.g., about 81%, 82%, 83%, 84%, 85%, 86%, 87%, 88%, 89%, 90%, 91%, 92%, 93%, 94%, 95%, 96%, 97%, 98%, 99%, or 100%) sequence identity to any one of SEQ ID NOs: 112-174 and 292-300. In some embodiments, the circular polyribonucleotide includes an open reading frame with a nucleic acid sequence encoding a SARS-CoV-2 immunogen, wherein the nucleic acid sequence has at least about 90% (e.g., about 91%, 92%, 93%, 94%, 95%, 96%, 97%, 98%, 99%, or 100%) sequence identity to any one of SEQ ID NOs: 112-174 and 292-300. In some embodiments, the circular polyribonucleotide includes an open reading frame with a nucleic acid sequence encoding a SARS-CoV-2 immunogen, wherein the nucleic acid sequence has at least about 95% (e.g., about 96%, 97%, 98%, 99%, or 100%) sequence identity to any one of SEQ ID NOs: 112-174 and 292-300. In certain embodiments, the circular polyribonucleotide includes an open reading frame with a nucleic acid sequence encoding a SARS-CoV-2 immunogen, wherein the nucleic acid sequence is any one of SEQ ID NOs: 112-174 and 292-300. In some embodiments, the polyribonucleotide sequence encoding the SARS-CoV-2 immunogen is a fragment including a contiguous stretch of at least 300, 400, 500, 600, 700, 800, 900, 1000, 1100, 1200, 1500, 2000, 2500, 3000, 3500, 4000, or 4500 nucleotides of any one of SEQ ID NOs: 112-174 and 292-300. In some embodiments, the polyribonucleotide sequence encoding the SARS-CoV-2 immunogen is a fragment including a contiguous stretch of at least 50%, 60%, 70%, 80%, 90%, or 95% of the amino acids of any one of SEQ ID NOs: 112-174 and 292-300.

[0154] In particular embodiments, the circular polyribonucleotide includes an open reading frame with a nucleic acid sequence encoding a SARS-CoV-2 immunogen, wherein the nucleic acid sequence has at least about 80% (e.g., about 81%, 82%, 83%, 84%, 85%, 86%, 87%, 88%, 89%, 90%, 91%, 92%, 93%, 94%, 95%, 96%, 97%, 98%, 99%, or 100%) sequence identity to any one of SEQ ID NOs: 219-281. In some embodiments, the circular polyribonucleotide includes an open reading frame with a nucleic acid sequence encoding a SARS-CoV-2 immunogen, wherein the nucleic acid sequence has at least about 90% (e.g., about 91%, 92%, 93%, 94%, 95%, 96%, 97%, 98%, 99%, or 100%) sequence identity to any one of SEQ ID NOs: 219-281. In some embodiments, the circular polyribonucleotide includes an open reading frame with a nucleic acid sequence encoding a SARS-CoV-2 immunogen, wherein the nucleic acid sequence has at least about 95% (e.g., about 96%, 97%, 98%, 99%, or 100%) sequence identity to any one of SEQ ID NOs: 219-281. In certain embodiments, the circular polyribonucleotide includes an open reading frame with a nucleic acid sequence encoding a SARS-CoV-2 immunogen, wherein the nucleic acid sequence is any one of SEQ ID NOs: 219-281. In some embodiments, the polyribonucleotide sequence encoding the SARS-CoV-2 immunogen is a fragment including a contiguous stretch of at least 300, 400, 500, 600, 700, 800, 900, 1000, 1100, 1200, 1500, 2000, 2500, 3000, 3500, 4000, or 4500 nucleotides of any one of SEQ ID NOs: 219-281. In some embodiments, the polyribonucleotide sequence encoding the SARS-CoV-2 immunogen is a fragment including a contiguous stretch of at least 50%, 60%, 70%, 80%, 90%, or 95% of the amino acids of any one of SEQ ID NOs: 219-281.

[0155] In particular embodiments, a circular polyribonucleotide comprises a SARS-CoV-2 RBD immunogen described in TABLE 3. In some embodiments, the immunogen comprises a sequence having at least about 80%, 85%, 90%, 95%, 97%, 98%, 99%, or 100% sequence identity to a sequence from TABLE 3. In some embodiments, the circular polyribonucleotide includes an open reading frame encoding a SARS-CoV-2 RBD immunogen having an amino acid sequence that is at least about 80% (e.g., about 81%, 82%, 83%, 84%, 85%, 86%, 87%, 88%, 89%, 90%, 91%, 92%, 93%, 94%, 95%, 96%, 97%, 98%, 99%, or 100%) identical to any one of SEQ ID NOs: 63-68, 74, 79, 81-86, and 98-111. In some embodiments, the circular polyribonucleotide includes an open reading frame encoding a SARS-CoV-2 RBD immunogen having an amino acid sequence that is at least about 90% (e.g., about 91%, 92%, 93%, 94%, 95%, 96%, 97%, 98%, 99%, or 100%) identical to any one of SEQ ID NOs: 63-68, 74, 79, 81-86, and 98-111. In some embodiments, the circular polyribonucleotide includes an open reading frame encoding a SARS-CoV-2 RBD immunogen having an amino acid sequence that is at least about 95% (e.g., about 96%, 97%, 98%, 99%, or 100%) identical to any one of SEQ ID NOs: 63-68, 74, 79, 81-86, and 98-111. In some embodiments, the circular polyribonucleotide includes an open reading frame encoding a SARS-CoV-2 immunogen having an amino acid sequence that is any one of SEQ ID NOs: 63-68, 74, 79, 81-86, and 98-111. In some embodiments, the SARS-CoV-2 RBD immunogen is an immunogenic fragment including a contiguous stretch of at least 100, 150, 200, 250, 300, 350, 400, 450, 500, 550, 600, 650, 700, 750, 800, 850, 900, 950, 1000, 1100, 1200, 1300, 1400, or 1500 amino acids of any one of SEQ ID NOs: 63-68, 74, 79, 81-86, and 98-111. In some embodiments, the SARS-CoV-2 RBD immunogen is an immunogenic fragment including a contiguous stretch of at least 50%, 60%, 70%, 80%, 90%, or 95% of the amino acids of a sequence any one of SEQ ID NOs: 63-68, 74, 79, 81-86, and 98-111.

[0156] In particular embodiments, the circular polyribonucleotide includes an open reading frame with a nucleic acid sequence encoding a SARS-CoV-2 RBD immunogen, wherein the nucleic acid sequence has at least about 80% (e.g., about 81%, 82%, 83%, 84%, 85%, 86%, 87%, 88%, 89%, 90%, 91%, 92%, 93%, 94%, 95%, 96%, 97%, 98%, 99%, or 100%) sequence identity to any one of SEQ ID NOs: 112-117, 123, 128, 133-138, and 163-174. In some embodiments, the circular polyribonucleotide includes an open reading frame with a nucleic acid sequence encoding a SARS-CoV-2 RBD immunogen, wherein the nucleic acid sequence has at least about 90% (e.g., about 91%, 92%, 93%, 94%, 95%, 96%, 97%, 98%, 99%, or 100%) sequence identity to any one of SEQ ID NOs: 112-117, 123, 128, 133-138, and 163-174. In some embodiments, the circular polyribonucleotide includes an open reading frame with a nucleic acid sequence encoding a SARS-CoV-2 RBD immunogen, wherein the nucleic acid sequence has at least about 95% (e.g., about 96%, 97%, 98%, 99%, or 100%) sequence identity to any one of SEQ ID NOs: 112-117, 123, 128, 133-138, and 163-174. In certain embodiments, the circular polyribonucleotide includes an open reading frame with a nucleic acid sequence encoding a SARS-CoV-2 RBD immunogen, wherein the nucleic acid sequence is any one of SEQ ID NOs: 112-117, 123, 128, 133-138, and 163-174. In some embodiments, the polyribonucleotide sequence encoding the SARS-CoV-2 RBD immunogen is a fragment including a contiguous stretch of at least 300, 400, 500, 600, 700, 800, 900, 1000, 1100, 1200, 1500, 2000, 2500, 3000, 3500, 4000, or 4500 nucleotides of any one of SEQ ID NOs: 112-117, 123, 128, 133-138, and 163-174. In some embodiments, the polyribonucleotide sequence encoding the SARS-CoV-2 RBD immunogen is a fragment including a contiguous stretch of at least 50%, 60%, 70%, 80%, 90%, or 95% of the amino acids of any one of SEQ ID NOs: 112-117, 123, 128, 133-138, and 163-174.

[0157] In particular embodiments, a circular polyribonucleotide comprises more than one SARS-CoV-2 RBD as described in TABLE 5. In some embodiments, the circular polyribonucleotide includes the open reading frames described in TABLE 5.

[0158] In particular embodiments, a circular polyribonucleotide comprises a SARS-CoV-2 Spike immunogen described in TABLE 4. In some embodiments, the immunogen comprises a sequence having at least about 80%, 85%, 90%, 95%, 97%, 98%, 99%, or 100% sequence identity to a sequence from TABLE 4. In some embodiments, the circular polyribonucleotide includes an open reading frame encoding a SARS-CoV-2 Spike immunogen having an amino acid sequence that is at least about 80% (e.g., about 81%, 82%, 83%, 84%, 85%, 86%, 87%, 88%, 89%, 90%, 91%, 92%, 93%, 94%, 95%, 96%, 97%, 98%, 99%, or 100%) identical to any one of SEQ ID NOs: 69-73, 75-78, 80, 87-97, and 283-286. In some embodiments, the circular polyribonucleotide includes an open reading frame encoding a SARS-CoV-2 Spike immunogen having an amino acid sequence that is at least about 90% (e.g., about 91%, 92%, 93%, 94%, 95%, 96%, 97%, 98%, 99%, or 100%) identical to any one of SEQ ID NOs: 69-73, 75-78, 80, 87-97, and 283-286. In some embodiments, the circular polyribonucleotide includes an open reading frame encoding a SARS-CoV-2 Spike immunogen having an amino acid sequence that is at least about 95% (e.g., about 96%, 97%, 98%, 99%, or 100%) identical to any one of SEQ ID NOs: 69-73, 75-78, 80, 87-97, and 283-286. In some embodiments, the circular polyribonucleotide includes an open reading frame encoding a SARS-CoV-2 immunogen having an amino acid sequence that is any one of SEQ ID NOs: 69-73, 75-78, 80, 87-97, and 283-286. In some embodiments, the SARS-CoV-2 Spike immunogen is an immunogenic fragment including a contiguous stretch of at least 100, 150, 200, 250, 300, 350, 400, 450, 500, 550, 600, 650, 700, 750, 800, 850, 900, 950, 1000, 1100, 1200, 1300, 1400, or 1500 amino acids of any one of SEQ ID NOs: 69-73, 75-78, 80, 87-97, and 283-286. In some embodiments, the SARS-CoV-2 Spike immunogen is an immunogenic fragment including a contiguous stretch of at least 50%, 60%, 70%, 80%, 90%, or 95% of the amino acids of a sequence any one of SEQ ID NOs: 69-73, 75-78, 80, 87-97, and 283-286.

[0159] In particular embodiments, the circular polyribonucleotide includes an open reading frame with a nucleic acid sequence encoding a SARS-CoV-2 Spike immunogen, wherein the nucleic acid sequence has at least about 80% (e.g., about 81%, 82%, 83%, 84%, 85%, 86%, 87%, 88%, 89%, 90%, 91%, 92%, 93%, 94%, 95%, 96%, 97%, 98%, 99%, or 100%) sequence identity to any one of SEQ ID NOs: 118-122, 124-127, 129-132, 139-162, and 287-291. In some embodiments, the circular polyribonucleotide includes an open reading frame with a nucleic acid sequence encoding a SARS-CoV-2 Spike immunogen, wherein the nucleic acid sequence has at least about 90% (e.g., about 91%, 92%, 93%, 94%, 95%, 96%, 97%, 98%, 99%, or 100%) sequence identity to any one of SEQ ID NOs: 118-122, 124-127, 129-132, 139-162, and 287-291. In some embodiments, the circular polyribonucleotide includes an open reading frame with a nucleic acid sequence encoding a SARS-CoV-2 Spike immunogen, wherein the nucleic acid sequence has at least about 95% (e.g., about 96%, 97%, 98%, 99%, or 100%) sequence identity to any one of SEQ ID NOs: 118-122, 124-127, 129-132, 139-162, and 287-291. In certain embodiments, the circular polyribonucleotide includes an open reading frame with a nucleic acid sequence encoding a SARS-CoV-2 Spike immunogen, wherein the nucleic acid sequence is any one of SEQ ID NOs: 118-122, 124-127, 129-132, 139-162, and 287-291. In some embodiments, the polyribonucleotide sequence encoding the SARS-CoV-2 Spike immunogen is a fragment including a contiguous stretch of at least 300, 400, 500, 600, 700, 800, 900, 1000, 1100, 1200, 1500, 2000, 2500, 3000, 3500, 4000, or 4500 nucleotides of any one of SEQ ID NOs: 118-122, 124-127, 129-132, 139-162, and 287-291. In some embodiments, the polyribonucleotide sequence encoding the SARS-CoV-2 Spike immunogen is a fragment including a contiguous stretch of at least 50%, 60%, 70%, 80%, 90%, or 95% of the amino acids of any one of SEQ ID NOs: 118-122, 124-127, 129-132, 139-162, and 287-291.

[0160] In particular embodiments, a circular polyribonucleotide comprises a SARS-CoV-2 nonstructural protein (nsp) immunogen. In some embodiments, the circular polyribonucleotide includes an open reading frame encoding a SARS-CoV-2 nsp immunogen having an amino acid sequence that is at least about 80% (e.g., about 81%, 82%, 83%, 84%, 85%, 86%, 87%, 88%, 89%, 90%, 91%, 92%, 93%, 94%, 95%, 96%, 97%, 98%, 99%, or 100%) identical to any one of SEQ ID NOs: 291-295. In some embodiments, the circular polyribonucleotide includes an open reading frame encoding a SARS-CoV-2 nsp immunogen having an amino acid sequence that is at least about 90% (e.g., about 91%, 92%, 93%, 94%, 95%, 96%, 97%, 98%, 99%, or 100%) identical to any one of SEQ ID NOs: 291-295. In some embodiments, the circular polyribonucleotide includes an open reading frame encoding a SARS-CoV-2 nsp immunogen having an amino acid sequence that is at least about 95% (e.g., about 96%, 97%, 98%, 99%, or 100%) identical to any one of SEQ ID NOs: 291-295. In some embodiments, the circular polyribonucleotide includes an open reading frame encoding a SARS-CoV-2 immunogen having an amino acid sequence that is any one of SEQ ID NOs: 291-295.

[0161] In some embodiments, the SARS-CoV-2 nsp immunogen is an immunogenic fragment including a contiguous stretch of at least 100, 150, 200, 250, 300, 350, 400, 450, 500, 550, 600, 650, 700, 750, 800, 850, 900, 950, 1000, 1100, 1200, 1300, 1400, or 1500 amino acids of any one of SEQ ID NOs: 291-295. In some embodiments, the SARS-CoV-2 nsp immunogen is an immunogenic fragment including a contiguous stretch of at least 50%, 60%, 70%, 80%, 90%, or 95% of the amino acids of a sequence any one of SEQ ID NOs: 291-295.

[0162] In particular embodiments, the circular polyribonucleotide includes an open reading frame with a nucleic acid sequence encoding a SARS-CoV-2 nsp immunogen, wherein the nucleic acid sequence has at least about 80% (e.g., about 81%, 82%, 83%, 84%, 85%, 86%, 87%, 88%, 89%, 90%, 91%, 92%, 93%, 94%, 95%, 96%, 97%, 98%, 99%, or 100%) sequence identity to any one of SEQ ID NOs: 296-300. In some embodiments, the circular polyribonucleotide includes an open reading frame with a nucleic acid sequence encoding a SARS-CoV-2 nsp immunogen, wherein the nucleic acid sequence has at least about 90% (e.g., about 91%, 92%, 93%, 94%, 95%, 96%, 97%, 98%, 99%, or 100%) sequence identity to any one of SEQ ID NOs: 296-300. In some embodiments, the circular polyribonucleotide includes an open reading frame with a nucleic acid sequence encoding a SARS-CoV-2 nsp immunogen, wherein the nucleic acid sequence has at least about 95% (e.g., about 96%, 97%, 98%, 99%, or 100%) sequence identity to any one of SEQ ID NOs: 296-300. In certain embodiments, the circular polyribonucleotide includes an open reading frame with a nucleic acid sequence encoding a SARS-CoV-2 nsp immunogen, wherein the nucleic acid sequence is any one of SEQ ID NOs: 296-300, and 287-291. In some embodiments, the polyribonucleotide sequence encoding the SARS-CoV-2 nsp immunogen is a fragment including a contiguous stretch of at least 300, 400, 500, 600, 700, 800, 900, 1000, 1100, 1200, 1500, 2000, 2500, 3000, 3500, 4000, or4500 nucleotides of any one of SEQ ID NOs: 296-300. In some embodiments, the polyribonucleotide sequence encoding the SARS-CoV-2 nsp immunogen is a fragment including a contiguous stretch of at least 50%, 60%, 70%, 80%, 90%, or 95% of the amino acids of any one of SEQ ID NOs: 296-300.

[0163] The disclosure specifically contemplates that any of the DNA sequences described herein may be converted to the corresponding RNA sequence and included in an RNA molecule described herein.

TABLE 3
SARS-CoV-2 RBD Immunogen Constructs

| Amino | Nucleic | Signal | |
|---|---|---|---|
| Acid | Acid | Sequence | |
| SEQ ID | SEQ ID | SEQ ID | |
| NO: | NO: | NO: | Description |
| 63 | 112 | hEPO | RBD immunogen with hEPO signal sequence |
| | | (SEQ ID | |
| | | NO: 197) | |
| 64 | 113 | IL2 | RBD immunogen with IL2 signal sequence |
| | | (SEQ ID | |
| | | NO: 199) | |
| 65 | 114 | gLuc | RBD immunogen with gLuc signal sequence |
| | | (SEQ ID | |
| | | NO: 198) | |
| 66 | 115 | hEPO | RBD immunogen with hEPO signal sequence |
| | | (SEQ ID | |
| | | NO: 197) | |
| 67 | 116 | IL2 | RBD immunogen with IL2 signal sequence |
| | | (SEQ ID | |
| | | NO: 199) | |
| 68 | 117 | IL2 | RBD immunogen with IL2 signal sequence |
| | | (SEQ ID | |
| | | NO: 199) | |
| 74 | 123 | gLuc | RBD immunogen with gLuc signal sequence |
| | | (SEQ ID | |
| | | NO: 198) | |
| 79 | 128 | gLuc | RBD immunogen with K417N, E484K, and N501Y |
| | | (SEQ ID | mutations |
| | | NO: 198) | |
| 81 | 133 | gLuc | Two RBD immunogens, each having a gLuc signal |
| | | (SEQ ID | sequence, where the gLuc-RBD immunogens are |
| | | NO: 198) | separated by a cleavable linker including a |
| | | | furin protease cleavage site and a P2A |
| | | | self-cleaving peptide |
| 82 | 134 | gLuc | Three RBD immunogens, each having a gLuc signal |
| | | (SEQ ID | sequence, where the gLuc-RBD immunogens are each |
| | | NO: 198) | separated by a cleavable linker including a |
| | | | furin protease cleavage site and a P2A |
| | | | self-cleaving peptide |
| 83 | 135 | gLuc | Two RBD immunogens, the first having a gLuc signal |
| | | (SEQ ID | sequence, where the RBD immunogens are separated |
| | | NO: 198) | by a cleavable linker including a furin protease |
| | | | cleavage site and a P2A self-cleaving peptide |
| 84 | 136 | gLuc | Two RBD immunogens, the first having a gLuc signal |
| | | (SEQ ID | sequence, where the first two RBD immunogens are |
| | | NO: 198) | separated by a cleavable linker including a |
| | | | furin protease cleavage site and a P2A |
| | | | self-cleaving, and the second two RBD immunogens |
| | | | are separated by a P2A self-cleaving peptide |
| 85 | 137 | gLuc | Two RBD immunogens, the first having a gLuc signal |
| | | (SEQ ID | sequence, where the RBD immunogens are separated |
| | | NO: 198) | by a cleavable linker including a furin protease |
| | | | cleavage site and a P2A self-cleaving peptide, |
| | | | and including an ovalbumin peptide |
| 86 | 138 | gLuc | Two RBD immunogens, each having a gLuc signal |
| | | (SEQ ID | sequence, separated by a SCO furin cleavage |
| | | NO: 198) | site and a P2A self-cleaving peptide |
| 98 | 163 | WT | RBD immunogen having a wildtype SARS-CoV-2 |
| | | (SEQ ID | signal sequence and a T4 foldon domain |
| | | NO: 198) | |
| 99 | 164 | gLuc | RBD immunogen having a gLuc signal sequence |
| | | (SEQ ID | |
| | | NO: 198) | |
| 100 | 165 | gLuc | RBD domain having a gLuc signal sequence, a GS |
| | | (SEQ ID | linker, and a T4 foldon domain |
| | | NO: 198) | |
| 101 | 166 | gLuc | Two RBD immunogens, the first having a gLuc signal |
| | | (SEQ ID | sequence, where the two RBD immunogens are |
| | | NO: 198) | separated by a GS linker, a T4 foldon domain, and |
| | | | another GS linker |
| 102 | 167 | gLuc | RBD immunogen having a gLuc signal sequence and a |
| | | (SEQ ID | ferritin domain |
| | | NO: 198) | |
| 103 | 168 | gLuc | RBD immunogen having a gLuc signal sequence, |
| | | (SEQ ID | a GS linker, and a ferritin domain |
| | | NO: 198) | |
| 104 | 169 | gLuc | RBD immunogen having a gLuc signal sequence and |
| | | (SEQ ID | linker with a T4 foldon and ferritin domain |
| | | NO: 198) | |
| 105 | 170 | gLuc | RBD immunogen having a gLuc signal sequence and |
| | | (SEQ ID | beta-annulus peptide |
| | | NO: 198) | |
| 106 | 171 | gLuc | RBD immunogen having a gLuc signal sequence, |
| | | (SEQ ID | a GS linker, and a beta-annulus peptide |
| | | NO: 198) | |
| 107 | 172 | gLuc | RBD immunogen having a gLuc signal sequence and |
| | | (SEQ ID | beta-annulus peptide |
| | | NO: 198) | |
| 108 | 173 | gLuc | RBD immunogen having a gLuc signal sequence, |
| | | (SEQ ID | a GS linker, and a beta-annulus peptide |
| | | NO: 198) | |
| 109 | — | gLuc | RBD immunogen having a gLuc signal, an adaptor, |
| | | (SEQ ID | and a PADRE epitope |
| | | NO: 198) | |
| 110 | — | gLuc | RBD immunogen having a gLuc signal, an adaptor, |
| | | (SEQ ID | and a Tetanus helper epitope |
| | | NO: 198) | |
| 111 | 174 | gLuc | RBD immunogen having a gLuc signal sequence and a |
| | | (SEQ ID | foldon domain |
| | | NO: 198) | |

TABLE 4
SARS-CoV-2 Spike Immunogen Constructs

| Amino | Nucleic | | |
|---|---|---|---|
| Acid | Acid | | |
| SEQ ID | SEQ ID | Secretion | |
| NO: | NO: | Signal | Description |
| 69 | 118 | gLuc | Spike immunogen with gLuc signal sequence |
| | | (SEQ ID | |
| | | NO: 198) | |
| 70 | 119 | WT | Spike immunogen with wildtype SARS-CoV-2 |
| | | (SEQ ID | signal sequence |
| | | NO: 200) | |
| 71 | 120 | WT | Spike immunogen with D614G mutation and |
| | | (SEQ ID | wildtype SARS-CoV-2 signal sequence and |
| | | NO: 200) | |
| 72 | 121 | WT | Spike immunogen with wildtype SARS-CoV-2 |
| | | (SEQ ID | signal sequence and furin cleavage site |
| | | NO: 200) | |
| 73 | 122 | WT | Spike immunogen with D614G mutation, |
| | | (SEQ ID | wildtype SARS-CoV-2 signal sequence, |
| | | NO: 200) | and furin cleavage site |
| 75 | 124 | WT | Spike immunogen with wildtype SARS-CoV-2 |
| | | (SEQ ID | signal sequence |
| | | NO: 200) | |
| 76 | 125 | WT | Spike immunogen (Brazil P.1 variant) |
| | | (SEQ ID | |
| | | NO: 200) | |
| 77 | 126 | WT | Spike immunogen (South African B.1.351 |
| | | (SEQ ID | variant) |
| | | NO: 200) | |
| 78 | 127 | WT | Spike immunogen (UK B.1.1.7 variant |
| | | (SEQ ID | immunogen) |
| | | NO: 200) | |
| 80 | 129 | WT | Spike immunogen (VOC B.1.351) |
| | | (SEQ ID | |
| | | NO: 200) | |
| 87 | 130 | — | Spike immunogen |
| 88 | 131 | WT | Spike immunogen with wild-type |
| | | (SEQ ID | signal sequence |
| | | NO: 200) | |
| 89 | 132 | WT | Spike immunogen with wild-type |
| | | (SEQ ID | signal sequence |
| | | NO: 200) | |
| 90 | 139-159 | WT | Spike immunogen with wild-type signal |
| | | (SEQ ID | sequence |
| | | NO: 200) | |
| 91 | — | — | Spike chimera1-RBD:SARS-CoV-NTD:HKU3-1-S2:SARS- |
| | | | CoV-2 |
| 92 | — | — | Spike chimera 2-RBD:SARS-CoV-2-NTD:SARS-CoV, |
| | | | S2:SARS-CoV |
| 93 | — | — | Spike chimera 3-RBD:SARS-CoV-NTD:SARS-CoV2, |
| | | | S2:SARS-CoV2 |
| 94 | — | — | Spike chimera 4-RBD:RsSHC014-NTD:SARS-CoV2, |
| | | | S2:SARS-CoV2 |
| 95 | 160 | Il2 | Spike immunogen having an IL-2 signal |
| | | (SEQ ID | sequence and a T4 foldon domain |
| | | NO: 199) | |
| 96 | 161 | Il2 | Spike immunogen having an IL-2 signal |
| | | (SEQ ID | sequence and a T4 foldon domain |
| | | NO: 199) | |
| 97 | 162 | gLuc | Spike immunogen having a gLuc signal |
| | | (SEQ ID | sequence |
| | | NO: 198) | |

TABLE 5
Constructs including single open reading frame with multiple immunogens

| Amino | Nucleic | | | | | | | | | | |
|---|---|---|---|---|---|---|---|---|---|---|---|
| Acid | Acid | | | | | | | | | | |
| SEQ | SEQ | Secretion | Immunogen | Cleavage | | Secretion | Immunogen | Cleavage | Element | Secretion | Immunogen |
| ID NO: | ID NO: | Signal 1 | 1 | site 1 | Element1 | Signal 2 | 2 | site 2 | 2 | Signal 3 | 3 |
| 81 | 133 | gLuc | RBD | Furin | P2A | gLuc | RBD | N/A | N/A | N/A | N/A |
| | | (SEQ ID | | cleavage | (SEQ ID | (SEQ ID | | | | | |
| | | NO: 198) | | site | NO: 202) | NO: 198) | | | | | |
| | | | | (SEQ ID | | | | | | | |
| | | | | NO: 201) | | | | | | | |
| 82 | 134 | gLuc | RBD | Furin | P2A | gLuc | RBD | Furin | P2A | gLuc | RBD |
| | | (SEQ ID | | cleavage | (SEQ ID | (SEQ ID | | cleavage | (SEQ ID | (SEQ ID | |
| | | NO: 198) | | site | NO: 202) | NO: 198) | | site | NO: 202) | NO: 198) | |
| | | | | (SEQ ID | | | | (SEQ ID | | | |
| | | | | NO: 201) | | | | NO: 201) | | | |
| 83 | 135 | gLuc | RBD | Furin | P2A | N/A | RBD | N/A | N/A | N/A | N/A |
| | | (SEQ ID | | cleavage | (SEQ ID | | | | | | |
| | | NO: 198) | | site | NO: 202) | | | | | | |
| | | | | (SEQ ID | | | | | | | |
| | | | | NO: 201) | | | | | | | |
| 84 | 136 | gLuc | RBD | Furin | P2A | N/A | RBD | N/A | P2A | N/A | RBD |
| | | (SEQ ID | | cleavage | (SEQ ID | | | | (SEQ ID | | |
| | | NO: 198) | | site | NO: 202) | | | | NO: 202) | | |
| | | | | (SEQ ID | | | | | | | |
| | | | | NO: 201) | | | | | | | |
| 86 | 138 | gLuc | RBD | SCO Furin | P2A | gLuc | RBD | N/A | N/A | N/A | N/A |
| | | (SEQ ID | | cleavage | (SEQ ID | (SEQ ID | | | | | |
| | | NO: 198) | | site (SEQ | NO: 202) | NO: 198) | | | | | |
| | | | | ID NO: 203) | | | | | | | |
| 101 | 166 | gLuc | RBD | N/A | Foldon | N/A | RBD | N/A | N/A | N/A | N/A |
| | | (SEQ ID | | | (SEQ ID | | | | | | |
| | | NO: 198) | | | NO: 204) | | | | | | |

[0164] In some embodiments, the GC content of a nucleic acid sequence encoding a SARS-CoV-2 immunogen is at least 51% (e.g., at least 52%, 53%, 54%, 55%, 56%, 57%, 58%, 59%, or 60%). In some embodiments, the GC content of a nucleic acid sequence encoding a SARS-CoV-2 immunogen is at most 52%, 53%, 54%, 55%, 56%, 57%, 58% or 59%, or 60%. In some embodiments, the GC content of a nucleic acid sequence encoding a SARS-CoV-2 immunogen is 51% to 60%, 52% to 60%, 53% to 60%, 54% to 60%, 55% to 60%, 52% to 58%, 53% to 58%.

[0165] In some embodiments, the uridine content (for RNA) or the thymidine content (for DNA) of a nucleic acid sequence encoding a SARS-CoV-2 immunogen is more than 10% (e.g., more than 11%, 12%, 13%, 14%, 15%, 16%, 17%, 18%, 19%, 20%, 21%, 22%, 23%, 24%, or 25%). In some embodiments, the uridine content (for RNA) or the thymidine content (for DNA) of a nucleic acid sequence encoding a SARS-CoV-2 immunogen is at most 30% (e.g., at most 29%, 28%, 27%, 26%, 25%, 24%, 23%, 22%, 21%, or 20%). In some embodiments, the uridine content (for RNA) or the thymidine content (for DNA) of a nucleic acid sequence encoding a SARS-CoV-2 immunogen is 20% to 28%, 21% to 26%, 10% to 24%, 15% to 24%, 20% to 24%, 21% to 24%, 22% to 24%, 23% to 24%, 10% to 23%, 15% to 23%, 20% to 23%, 21% to 23%, or 22% to 23%.

[0166] The GC content of an expression sequence encoding the SARS-CoV-2 immunogen refers to the GC content of the expression sequence that exclusively encodes the SARS-CoV-2 immunogen with no other coding regions that encode peptides other than the SARS-CoV-2 immunogen. Likewise, the uridine content or thymidine of an expression sequence encoding the SARS-CoV-2 immunogen refers to the uridine content of the expression sequence that exclusively encodes the SARS-CoV-2 immunogen with no other coding regions that encode peptides other than the SARS-CoV-2 immunogen. In some embodiments, the calculation of the GC content or the uridine (or thymidine) content of the expression sequence encoding the SARS-CoV-2 immunogen only takes into account the continuous nucleic acid sequence that starts in a 5′ to 3′ direction from the first nucleoside of the start codon of the open reading frame that encodes the SARS-CoV-2 immunogen to the last nucleoside of the stop codon of the same open reading frame. In other embodiments, the calculation of the GC content or the uridine (or thymidine) content of the expression sequence encoding the SARS-CoV-2 immunogen only takes into account the continuous nucleic acid sequence that starts in a 5′ to 3′ direction from the first nucleoside of the codon that encodes the N-terminal end amino acid residue of the SARS-CoV-2 immunogen to the last nucleoside of the codon that encodes the C-terminal end amino acid residue of the SARS-CoV-2 immunogen.

[0167] In some embodiments, an immunogen or epitope is from a host subject (e.g., a subject for immunization) cell. For example, antibodies that block entry of a coronavirus can be produced by using an immunogen or epitope from a component of a host cell that the virus uses as an entry factor.

[0168] In some embodiments, a coronavirus epitope comprises or contains at least 4, at least 5, at least 6, at least 7, at least 8, at least 9, at least 10, at least 11, at least 12, at least 13, at least 14, at least 15, at least 16, at least 17, at least 18, at least, 19, at least 20, at least 21, at least 22, at least 23, at least 24, at least 25, at least 26, at least 27, at least 28, at least 29, or at least 30 amino acids, or more. In some embodiments, a coronavirus epitope comprises or contains at most 4, at most 5, at most 6, at most 7, at most 8, at most 9, at most 10, at most 11, at most 12, at most 13, at most 14, at most 15, at most 16, at most 17, at most 18, at most 19, at most 20, at most 21, at most 22, at most 23, at most 24, at most 25, at most 26, at most 27, at most 28, at most 29, or at most 30 amino acids, or less. In some embodiments, a coronavirus epitope comprises or contains 1, 2, 3, 4, 5, 6, 7, 8, 9, 10, 11, 12, 13, 14, 15, 16, 17, 18, 19, 20, 21, 22, 23, 24, 25, 26, 27, 28, 29, or 30 amino acids. In some embodiments, a coronavirus epitope contains 5 amino acids. In some embodiments, a coronavirus epitope contains 6 amino acids. In some embodiments, an epitope contains 7 amino acids. In some embodiments, a coronavirus epitope contains 8 amino acids. In some embodiments, an epitope can be about 8 to about 11 amino acids. In some embodiments, an epitope can be about 9 to about 22 amino acids.

[0169] The coronavirus immunogens may comprise immunogens recognized by B cells, immunogens recognized by T cells, or a combination thereof. In some embodiments, the immunogens comprise immunogens recognized by B cells. In some embodiments, the coronavirus immunogens are immunogens recognized by B cells. In some embodiments, the coronavirus immunogens comprise immunogens recognized by T cells. In some embodiments, the immunogens are immunogens recognized by T cells.

[0170] The coronavirus epitopes comprise recognized by B cells, immunogens recognized by T cells, or a combination thereof. In some embodiments, the coronavirus epitopes comprise epitopes recognized by B cells. In some embodiments, the epitopes are epitopes recognized by B cells. In some embodiments, the coronavirus epitopes comprise epitopes recognized by T cells. In some embodiments, the coronavirus epitopes are epitopes recognized by T cells.

[0171] Techniques for identifying immunogens and epitopes in silico have been disclosed, for example, in Sanchez-Trincado, et al. (2017), Fundamentals and methods for T-and B-cell epitope prediction, JOURNAL OF IMMUNOLOGY RESEARCH; Grifoni, Alba, et al., A Sequence Homology and Bioinformatic Approach Can Predict Candidate Targets for Immune Responses to SARS-CoV-2. CELL HOST & MICROBE (2020); Russi et al., and, In silico prediction of T-and B-cell epitopes in PmpD: First step towards to the design of a Chlamydia trachomatis vaccine, BIOMEDICAL JOURNAL 41.2 (2018): 109-17; Baruah, et al. Immunoinformatics-aided identification of T cell and B cell epitopes in the surface glycoprotein of 2019-nCoV. Journal of Medical Virology (2020); each of which is incorporated herein by reference in its entirety.

[0172] A circular polyribonucleotide of the disclosure may comprise sequences of any number of coronavirus immunogens and/or epitopes. A circular polyribonucleotide comprises a sequence, for example, of at least 1, at least 2, at least 3, at least 4, at least 5, at least 6, at least 7, at least 8, at least 9, at least 10, at least 15, at least 20, at least 25, at least 30, at least 40, at least 50, at least 60, at least 70, at least 80, at least 90, at least 100, at least 120, at least 140, at least 160, at least 180, at least 200, at least 250, at least 300, at least 350, at least 400, at least 450, at least 500, or more coronavirus immunogens or epitopes (e.g., selected from any of the coronavirus immunogens and/or epitopes described herein).

[0173] In some embodiments, a circular polyribonucleotide comprises a sequence for example, of at most 1, at most 2, at most 3, at most 4, at most 5, at most 6, at most 7, at most 8, at most 9, at most 10, at most 15, at most 20, at most 25, at most 30, at most 40, at most 50, at most 60, at most 70, at most 80, at most 90, at most 100, at most 120, at most 140, at most 160, at most 180, at most 200, at most 250, at most 300, at most 350, at most 400, at most 450, at most 500, or less coronavirus immunogens or epitopes.

[0174] In some embodiments, a circular polyribonucleotide comprises a sequence, for example, of about 1, 2, 3, 4, 5, 6, 7, 8, 9, 10, 15, 20, 25, 30, 40, 50, 60, 70, 80, 90, 100, 120, 140, 160, 180, 200, 250, 300, 350, 400, 450, or 500 coronavirus immunogens or epitopes.

[0175] A circular polyribonucleotide may comprise a sequence for one or more coronavirus epitopes from a coronavirus immunogen. For example, a coronavirus immunogen can comprise an amino acid sequence, which can contain multiple coronavirus epitopes (e.g., epitopes recognized by B cells and/or T cells) therein, and a circular polyribonucleotide can comprise or encode one or more of those coronavirus epitopes. In some embodiments, the circular polyribonucleotide may include one or more sequences encoding a coronavirus immunogen and one or more sequences encoding immunogens that are note a coronavirus immunogen. For example, the circular polyribonucleotide may include one or more sequences encoding a coronavirus immunogen and one or more sequences encoding an immunogen from another virus (e.g., an influenza virus immunogen).

[0176] A circular polyribonucleotide comprises a sequence, for example, of at least 1, at least 2, at least 3, at least 4, at least 5, at least 6, at least 7, at least 8, at least 9, at least 10, at least 15, at least 20, at least 25, at least 30, at least 40, at least 50, at least 60, at least 70, at least 80, at least 90, at least 100, at least 120, at least 140, at least 160, at least 180, at least 200, at least 250, at least 300, at least 350, at least 400, at least 450, at least 500, or more epitopes from one coronavirus immunogen.

[0177] In some embodiments, a circular polyribonucleotide comprises, for example, a sequence of at most 2, at most 3, at most 4, at most 5, at most 6, at most 7, at most 8, at most 9, at most 10, at most 15, at most 20, at most 25, at most 30, at most 40, at most 50, at most 60, at most 70, at most 80, at most 90, at most 100, at most 120, at most 140, at most 160, at most 180, at most 200, at most 250, at most 300, at most 350, at most 400, at most 450, or at most 500, or less coronavirus epitopes from one coronavirus immunogen.

[0178] In some embodiments, a circular polyribonucleotide comprises a sequence, for example, of about 1, 2, 3, 4, 5, 6, 7, 8, 9, 10, 15, 20, 25, 30, 40, 50, 60, 70, 80, 90, 100, 120, 140, 160, 180, 200, 250, 300, 350, 400, 450, or 500 coronavirus epitopes from one coronavirus immunogen.

[0179] A circular polyribonucleotide may encode variants of a coronavirus immunogen or epitope. Variants may be naturally occurring variants (for example, variants identified in sequence data from different coronavirus genera, species, isolates, or quasi species), or may be derivative sequences as disclosed herein that have been generated in silico (for example, immunogen or epitopes with one or more amino acid insertions, deletions, substitutions, or a combination thereof compared to a wild-type immunogen or epitope).

[0180] A circular polyribonucleotide comprises a sequence, for example, of at least 1, at least 2, at least 3, at least 4, at least 5, at least 6, at least 7, at least 8, at least 9, at least 10, at least 15, at least 20, at least 25, at least 30, at least 40, at least 50, at least 60, at least 70, at least 80, at least 90, at least 100, at least 120, at least 140, at least 160, at least 180, at least 200, at least 250, at least 300, at least 350, at least 400, at least 450, at least 500, or more variants of a coronavirus immunogen or epitope.

[0181] In some embodiments, a circular polyribonucleotide comprises a sequence, for example, of at most 2, at most 3, at most 4, at most 5, at most 6, at most 7, at most 8, at most 9, at most 10, at most 15, at most 20, at most 25, at most 30, at most 40, at most 50, at most 60, at most 70, at most 80, at most 90, at most 100, at most 120, at most 140, at most 160, at most 180, at most 200, at most 250, at most 300, at most 350, at most 400, at most 450, at most 500, or less variants of a coronavirus immunogen or epitope.

[0182] In some embodiments, a circular polyribonucleotide comprises a sequence, for example, of about 1, 2, 3, 4, 5, 6, 7, 8, 9, 10, 15, 20, 25, 30, 40, 50, 60, 70, 80, 90, 100, 120, 140, 160, 180, 200, 250, 300, 350, 400, 450, or 500 variants of a coronavirus immunogen or epitope.

[0183] A coronavirus immunogen and/or epitope sequence of a circular polyribonucleotide can also be referred to as a coronavirus expression sequence. In some embodiments, the circular polyribonucleotide comprises one or more coronavirus expression sequences, each of which may encode a coronavirus polypeptide. The coronavirus polypeptide may be produced in substantial amounts. A coronavirus polypeptide can be a coronavirus polypeptide that is secreted from a cell, or localized to the cytoplasm, nucleus or membrane compartment of a cell. Some coronavirus polypeptides include, but are not limited to, an immunogen as disclosed herein, an epitope as disclosed herein, at least a portion of a coronavirus protein (for example, a viral envelope protein, viral matrix protein, viral spike protein, viral receptor binding domain (RBD) of a viral spike protein, viral membrane protein, viral nucleocapsid protein, viral accessory protein, a fragment thereof, or a combination thereof). In some embodiments, a coronavirus polypeptide encoded by a circular polyribonucleotide of the disclosure comprises a fragment of a coronavirus immunogen disclosed herein. In some embodiments, a coronavirus polypeptide encoded by a circular polyribonucleotide of the disclosure comprises a fusion protein comprising two or more coronavirus immunogens disclosed herein, or fragments thereof. In some embodiments, a coronavirus polypeptide encoded by a circular polyribonucleotide of the disclosure comprises a coronavirus epitope. In some embodiments, a polypeptide encoded by a circular polyribonucleotide of the disclosure comprises a fusion protein comprising two or more coronavirus epitopes disclosed herein, for example, an artificial peptide sequence comprising a plurality of predicted epitopes from one or more coronavirus s of the disclosure.

[0184] In some embodiments, exemplary coronavirus proteins that are expressed from the circular polyribonucleotide disclosed herein include a secreted protein, for example, a protein (e.g., immunogen and/or epitope) that naturally includes a signal peptide, or one that does not usually encode a signal peptide but is modified to contain one.

[0185] In some cases, the circular polyribonucleotide expresses a secretary coronavirus protein that has a short half-life in the blood, or is a protein with a subcellular localization signal, or protein with secretory signal peptide. In some cases, the circular polyribonucleotide expresses a transmembrane domain that has a short half-life in the blood, or is a protein with a subcellular localization signal, or protein with secretory peptide.

[0186] In some embodiments, the circular polyribonucleotide comprises one or more coronavirus expression sequences and is configured for persistent expression in a cell of a subject (e.g., a subject for immunization) in vivo. In some embodiments, the circular polyribonucleotide is configured such that expression of the one or more coronavirus expression sequences in the cell at a later time point is equal to or higher than an earlier time point. In such embodiments, the expression of the one or more coronavirus expression sequences is either maintained at a relatively stable level or can increase over time. In some embodiments, the expression of the coronavirus expression sequences is relatively stable for an extended period of time.

[0187] In some embodiments, the circular polyribonucleotide expresses one or more coronavirus immunogens and/or epitopes in a subject (e.g., a subject for immunization), e.g., transiently or long term. In certain embodiments, expression of the coronavirus expression sequences persists for at least about 1 hr to about 30 days, or at least about 2 hrs, 6 hrs, 12 hrs, 18 hrs, 24 hrs, 2 days, 3, days, 4 days, 5 days, 6 days, 7 days, 8 days, 9 days, 10 days, 11 days, 12 days, 13 days, 14 days, 15 days, 16 days, 17 days, 18 days, 19 days, 20 days, 21 days, 22 days, 23 days, 24 days, 25 days, 26 days, 27 days, 28 days, 29 days, 30 days, 60 days, or longer or any time therebetween. In certain embodiments, expression of the coronavirus immunogens and/or epitopes persists for no more than about 30 mins to about 7 days, or no more than about 1 hr, 2 hrs, 3 hrs, 4 hrs, 5 hrs, 6 hrs, 7 hrs, 8 hrs, 9 hrs, 10 hrs, 11 hrs, 12 hrs, 13 hrs, 14 hrs, 15 hrs, 16 hrs, 17 hrs, 18 hrs, 19 hrs, 20 hrs, 21 hrs, 22 hrs, 24 hrs, 36 hrs, 48 hrs, 60 hrs, 72 hrs, 4 days, 5 days, 6 days, 7 days, 8 days, 9 days, 10 days, 11 days, 12 days, 13 days, 14 days, 15 days, 16 days, 17 days, 18 days, 19 days, 20 days, 21 days, 22 days, 23 days, 24 days, 25 days, 26 days, 27 days, 28 days, 29 days, 30 days, 45 days, 60 days, 75 days, 90 days, or any time therebetween.

[0188] In some embodiments, the coronavirus expression sequence has a length less than 5000 bps (e.g., less than about 5000 bps, 4000 bps, 3000 bps, 2000 bps, 1000 bps, 900 bps, 800 bps, 700 bps, 600 bps, 500 bps, 400 bps, 300 bps, 200 bps, 100 bps, 50 bps, 40 bps, 30 bps, 20 bps, 10 bps, or less). In some embodiments, the coronavirus expression sequence has, independently or in addition to, a length greater than 10 bps (e.g., at least about 10 bps, 20 bps, 30 bps, 40 bps, 50 bps, 60 bps, 70 bps, 80 bps, 90 bps, 100 bps, 200 bps, 300 bps, 400 bps, 500 bps, 600 bps, 700 bps, 800 bps, 900 bps, 1000 kb, 1.1 kb, 1.2 kb, 1.3 kb, 1.4 kb, 1.5 kb, 1.6 kb, 1.7 kb, 1.8 kb, 1.9 kb, 2 kb, 2.1 kb, 2.2 kb, 2.3 kb, 2.4 kb, 2.5 kb, 2.6 kb, 2.7 kb, 2.8 kb, 2.9 kb, 3 kb, 3.1 kb, 3.2 kb, 3.3 kb, 3.4 kb, 3.5 kb, 3.6 kb, 3.7 kb, 3.8 kb, 3.9 kb, 4 kb, 4.1 kb, 4.2 kb, 4.3 kb, 4.4 kb, 4.5 kb, 4.6 kb, 4.7 kb, 4.8 kb, 4.9 kb, 5 kb or greater).

[0189] In some embodiments, the circular polyribonucleotide encodes a plurality of immunogens (e.g., one or more, two or more, three or more, four or more, or five or more immunogens) and the plurality of immunogens share at least 90%, 91%, 92%, 93%, 94%, 95%, 96%, 97%, 98%, or 99% sequence identity. In some embodiments, the plurality of immunogens also has less than 100% sequence identity. This may be indicative of immunogens related to one another by genetic drift, as such, a single circular polyribonucleotide composition or immunogenic composition may be able to induce an immune response against a target that exists in various mutational states in a population or may induce an immune response against multiple targets having the same immunogen where the immunogen is related by genetic drift. For example, the immunogens may be related to one another by genetic drift of a target virus (e.g., a coronavirus, such as SARS-Cov-2).

### Derivatives and Fragments

[0190] An immunogen or epitope of the disclosure can comprise a wild-type sequence. When describing an immunogen or epitope, the term “wild type” refers to a sequence (e.g., an amino acid sequence) that is naturally occurring and encoded by a genome (e.g., a coronavirus genome). A coronavirus can have one wild-type sequence, or two or more wild type sequences (for example, with one canonical wild-type sequence present in a reference coronavirus genome, and additional variant wild-type sequences present that have arisen from mutations).

[0191] When describing an immunogen or epitope, the terms “derivative” and “derived from” refer to a sequence (e.g., amino acid sequence) that differs from a wild-type sequence by one or more amino acids, for example, containing one or more amino acid insertions, deletions, and/or substitutions relative to a wildtype sequence.

[0192] An immunogen or epitope derivative sequence is a sequence that has at least 60%, 70%, 75%, 80%, 85%, 90%, 91%, 92%, 93%, 94%, 95%, 96%, 97%, 98%, 99%, or more sequence identity to a wild-type sequence, for example, a wild type protein, immunogen, or epitope sequence.

[0193] In some embodiments, an immunogen or epitope contains one or more amino acid insertions, deletions, substitutions, or a combination thereof that affect the structure of an encoded protein. In some embodiments, an immunogen or epitope contains one or more amino acid insertions, deletions, substitutions, or a combination thereof that affect the function of an encoded protein. In some embodiments, an immunogen or epitope contains one or more amino acid insertions, deletions, substitutions, or a combination thereof that affect the expression or processing of an encoded protein by a cell.

[0194] Amino acid insertions, deletions, substitutions, or a combination thereof can introduce a site for a post-translational modification (for example, introduce a glycosylation, ubiquitination, phosphorylation, nitrosylation, methylation, acetylation, amidation, hydroxylation, sulfation, or lipidation site, or a sequence that is targeted for cleavage). In some embodiments, amino acid insertions, deletions, substitutions, or a combination thereof remove a site for a post-translational modification (for example, remove a glycosylation, ubiquitination, phosphorylation, nitrosylation, methylation, acetylation, amidation, hydroxylation, sulfation, or lipidation site, or a sequence that is targeted for cleavage). In some embodiments, amino acid insertions, deletions, substitutions, or a combination thereof modify a site for a post-translational modification (for example, modify a site to alter the efficiency or characteristics of glycosylation, ubiquitination, phosphorylation, nitrosylation, methylation, acetylation, amidation, hydroxylation, sulfation, or lipidation site, or cleavage).

[0195] An amino acid substitution can be a conservative or a non-conservative substitution. A conservative amino acid substitution can be a substitution of one amino acid for another amino acid of similar biochemical properties (e.g., charge, size, and/or hydrophobicity). A non-conservative amino acid substitution can be a substitution of one amino acid for another amino acid with different biochemical properties (e.g., charge, size, and/or hydrophobicity). A conservative amino acid change can be, for example, a substitution that has minimal effect on the secondary or tertiary structure of a polypeptide. A conservative amino acid change can be an amino acid change from one hydrophilic amino acid to another hydrophilic amino acid. Hydrophilic amino acids can include Thr (T), Ser (S), His (H), Glu (E), Asn (N), Gln (Q), Asp (D), Lys (K) and Arg (R). A conservative amino acid change can be an amino acid change from one hydrophobic amino acid to another hydrophilic amino acid. Hydrophobic amino acids can include Ile (I), Phe (F), Val (V), Leu (L), Trp (W), Met (M), Ala (A), Gly (G), Tyr (Y), and Pro (P). A conservative amino acid change can be an amino acid change from one acidic amino acid to another acidic amino acid. Acidic amino acids can include Glu (E) and Asp (D). A conservative amino acid change can be an amino acid change from one basic amino acid to another basic amino acid. Basic amino acids can include His (H), Arg (R) and Lys (K). A conservative amino acid change can be an amino acid change from one polar amino acid to another polar amino acid. Polar amino acids can include Asn (N), Gln (Q), Ser (S) and Thr (T). A conservative amino acid change can be an amino acid change from one nonpolar amino acid to another nonpolar amino acid. Nonpolar amino acids can include Leu (L), Val (V), Ile (I), Met (M), Gly (G) and Ala (A). A conservative amino acid change can be an amino acid change from one aromatic amino acid to another aromatic amino acid. Aromatic amino acids can include Phe (F), Tyr (Y) and Trp (W). A conservative amino acid change can be an amino acid change from one aliphatic amino acid to another aliphatic amino acid. Aliphatic amino acids can include Ala (A), Val (V), Leu (L) and Ile (I). In some embodiments, a conservative amino acid substitution is an amino acid change from one amino acid to another amino acid within one of the following groups: Group I: ala, pro, Gly, Gln, Asn, Ser, Thr; Group II: Cys, Ser, Tyr, Thr; Group III: Val, lie, Leu, Met, Ala, Phe; Group IV: Lys, Arg, His; Group V: Phe, Tyr, Trp, His; and Group VI: Asp, Glu.

[0196] In some embodiments, an immunogen derivative or epitope derivative of the disclosure comprises at least 1, at least 2, at least 3, at least 4, at least 5, at least 6, at least 7, at least 8, at least 9, at least 10, at least 11, at least 12, at least 13, at least 14, at least 15, at least 16, at least 17, at least 18, at least 19, at least 20, at least 25, at least 30, at least 35, at least 40, at least 45, at least 50, at least 60, at least 70, at least 80, at least 90, or at least 100 amino acid deletions relative to a sequence disclosed herein (e.g., a wild type sequence).

[0197] In some embodiments, an immunogen derivative or epitope derivative of the disclosure comprises at least 1, at least 2, at least 3, at least 4, at least 5, at least 6, at least 7, at least 8, at least 9, at least 10, at least 11, at least 12, at least 13, at least 14, at least 15, at least 16, at least 17, at least 18, at least 19, at least 20, at least 25, at least 30, at least 35, at least 40, at least 45, or at least 50 amino acid substitutions relative to a sequence disclosed herein (e.g., a wild-type sequence).

[0198] In some embodiments, an immunogen derivative or epitope derivative of the disclosure comprises at most 1, at most 2, at most 3, at most 4, at most 5, at most 6, at most 7, at most 8, at most 9, at most 10, at most 11, at most 12, at most 13, at most 14, at most 15, at most 16, at most 17, at most 18, at most 19, at most 20, at most 25, at most 30, at most 35, at most 40, at most 45, or at most 50 amino acid substitutions relative to a sequence disclosed herein (e.g., a wild-type sequence).

[0199] In some embodiments, an immunogen derivative or epitope derivative of the disclosure comprises 1-2, 1-3, 1-4, 1-5, 1-6, 1-7, 1-8, 1-9, 1-10, 1-15, 1-20, 1-30, 1-40, 2-3, 2-4, 2-5, 2-6, 2-7, 2-8, 2-9, 2-10, 2-15, 2-20, 2-30, 2-40, 3-3, 3-4, 3-5, 3-6, 3-7, 3-8, 3-9, 3-10, 3-15, 3-20, 3-30, 3-40, 5-6, 5-7, 5-8, 5-9, 5-10, 5-15, 5-20, 5-30, 5-40, 10-15, 15-20, or 20-25 amino acid substitutions relative to a sequence disclosed herein (e.g., a wild-type sequence).

[0200] In some embodiments, an immunogen derivative or epitope derivative of the disclosure comprises 1, 2, 3, 4, 5, 6, 7, 8, 9, 10, 11, 12, 13, 14, 15, 16, 17, 18, 19, or 20 amino acid substitutions relative to a sequence disclosed herein (e.g., a wild-type sequence).

[0201] The one or more amino acid substitutions can be at the N-terminus, the C-terminus, within the amino acid sequence, or a combination thereof. The amino acid substitutions can be contiguous, non-contiguous, or a combination thereof.

[0202] In some embodiments, an immunogen derivative or epitope derivative of the disclosure comprises at most 1, at most 2, at most 3, at most 4, at most 5, at most 6, at most 7, at most 8, at most 9, at most 10, at most 11, at most 12, at most 13, at most 14, at most 15, at most 16, at most 17, at most 18, at most 19, at most 20, at most 25, at most 30, at most 35, at most 40, at most 45, at most 50, at most 60, at most 70, at most 80, at most 90, at most 100, at most 120, at most 140, at most 160, at most 180, or at most 200 amino acid deletions relative to a sequence disclosed herein (e.g., a wild type sequence).

[0203] In some embodiments, an immunogen derivative or epitope derivative of the disclosure comprises 1-2, 1-3, 1-4, 1-5, 1-6, 1-7, 1-8, 1-9, 1-10, 1-15, 1-20, 1-30, 1-40, 2-3, 2-4, 2-5, 2-6, 2-7, 2-8, 2-9, 2-10, 2-15, 2-20, 2-30, 2-40, 3-3, 3-4, 3-5, 3-6, 3-7, 3-8, 3-9, 3-10, 3-15, 3-20, 3-30, 3-40, 5-6, 5-7, 5-8, 5-9, 5-10, 5-15, 5-20, 5-30, 5-40, 10-15, 15-20, 20-25, 20-30, 30-50, 50-100, or 100-200 amino acid deletions relative to a sequence disclosed herein (e.g., a wild type sequence).

[0204] In some embodiments, an immunogen derivative or epitope derivative of the disclosure comprises 1, 2, 3, 4, 5, 6, 7, 8, 9, 10, 11, 12, 13, 14, 15, 16, 17, 18, 19, or 20 amino acid deletions relative to a sequence disclosed herein (e.g., a wild-type sequence).

[0205] The one or more amino acid deletions can be at the N-terminus, the C-terminus, within the amino acid sequence, or a combination thereof. The amino acid deletions can be contiguous, non-contiguous, or a combination thereof.

[0206] In some embodiments, an immunogen derivative or epitope derivative of the disclosure comprises at least 1, at least 2, at least 3, at least 4, at least 5, at least 6, at least 7, at least 8, at least 9, at least 10, at least 11, at least 12, at least 13, at least 14, at least 15, at least 16, at least 17, at least 18, at least 19, at least 20, at least 25, at least 30, at least 35, at least 40, at least 45, or at least 50 amino acid insertions relative to a sequence disclosed herein (e.g., a wild type sequence).

[0207] In some embodiments, an immunogen derivative or epitope derivative of the disclosure comprises at most 1, at most 2, at most 3, at most 4, at most 5, at most 6, at most 7, at most 8, at most 9, at most 10, at most 11, at most 12, at most 13, at most 14, at most 15, at most 16, at most 17, at most 18, at most 19, at most 20, at most 25, at most 30, at most 35, at most 40, at most 45, or at most 50 amino acid insertions relative to a sequence disclosed herein (e.g., a wild type sequence).

[0208] In some embodiments, an immunogen derivative or epitope derivative of the disclosure comprises 1-2, 1-3, 1-4, 1-5, 1-6, 1-7, 1-8, 1-9, 1-10, 1-15, 1-20, 1-30, 1-40, 2-3, 2-4, 2-5, 2-6, 2-7, 2-8, 2-9, 2-10, 2-15, 2-20, 2-30, 2-40, 3-3, 3-4, 3-5, 3-6, 3-7, 3-8, 3-9, 3-10, 3-15, 3-20, 3-30, 3-40, 5-6, 5-7, 5-8, 5-9, 5-10, 5-15, 5-20, 5-30, 5-40, 10-15, 15-20, or 20-25 amino acid insertions relative to a sequence disclosed herein (e.g., a wild type sequence).

[0209] In some embodiments, an immunogen derivative or epitope derivative of the disclosure comprises 1, 2, 3, 4, 5, 6, 7, 8, 9, 10, 11, 12, 13, 14, 15, 16, 17, 18, 19, or 20 amino acid insertions relative to a sequence disclosed herein (e.g., a wild-type sequence).

[0210] The one or more amino acid insertions can be at the N-terminus, the C-terminus, within the amino acid sequence, or a combination thereof. The amino acid insertions can be contiguous, non-contiguous, or a combination thereof.

### Circular Polyribonucleotide Elements

[0211] The circular polyribonucleotide comprises the elements as described below as well as the coronavirus immunogen or epitope as described herein. In some embodiments, the circular polyribonucleotide includes any feature, or any combination of features as disclosed in International Patent Publication No. WO2019/118919, which is hereby incorporated by reference in its entirety.

[0212] In some embodiments, the circular polyribonucleotide is at least about 20 nucleotides, at least about 30 nucleotides, at least about 40 nucleotides, at least about 50 nucleotides, at least about 75 nucleotides, at least about 100 nucleotides, at least about 200 nucleotides, at least about 300 nucleotides, at least about 400 nucleotides, at least about 500 nucleotides, at least about 1,000 nucleotides, at least about 2,000 nucleotides, at least about 5,000 nucleotides, at least about 6,000 nucleotides, at least about 7,000 nucleotides, at least about 8,000 nucleotides, at least about 9,000 nucleotides, at least about 10,000 nucleotides, at least about 12,000 nucleotides, at least about 14,000 nucleotides, at least about 15,000 nucleotides, at least about 16,000 nucleotides, at least about 17,000 nucleotides, at least about 18,000 nucleotides, at least about 19,000 nucleotides, or at least about 20,000 nucleotides.

[0213] In some embodiments, the circular polyribonucleotide is between 500 nucleotides and 20,000 nucleotides, between 1,000 and 20,000 nucleotides, between 2,000 and 20,000 nucleotides, or between 5,000 and 20,000 nucleotides. In some embodiments, the circular polyribonucleotide is between 500 nucleotides and 10,000 nucleotides, between 1,000 and 10,000 nucleotides, between 2,000 and 10,000 nucleotides, or between 5,000 and 10,000 nucleotides.

### Internal Ribosome Entry Sites

[0214] In some embodiments, a circular or linear polyribonucleotide described herein includes one or more internal ribosome entry site (IRES) elements. In some embodiments, the IRES is operably linked to one or more expression sequences (e.g., each IRES is operably linked to one or more expression sequences, where each expression sequence optionally encodes an immunogen, such as a coronavirus immunogen). In embodiments, the IRES is located between a heterologous promoter and the 5′ end of a coding sequence (e.g., a coding sequence encoding a coronavirus immunogen).

[0215] A suitable IRES element to include in a polyribonucleotide includes an RNA sequence capable of engaging a eukaryotic ribosome. In some embodiments, the IRES element is at least about 5 nt, at least about 8 nt, at least about 9 nt, at least about 10 nt, at least about 15 nt, at least about 20 nt, at least about 25 nt, at least about 30 nt, at least about 40 nt, at least about 50 nt, at least about 100 nt, at least about 200 nt, at least about 250 nt, at least about 350 nt, or at least about 500 nt.

[0216] In some embodiments, the IRES element is derived from the DNA of an organism including, but not limited to, a virus, a mammal, and a Drosophila. Such viral DNA may be derived from, but is not limited to, picomavirus complementary DNA (cDNA), with encephalomyocarditis virus (EMCV) cDNA and poliovirus cDNA. In one embodiment, Drosophila DNA from which an IRES element is derived includes, but is not limited to, an Antennapedia gene from Drosophila melanogaster.

[0217] In some embodiments, the IRES sequence is an IRES sequence of Taura syndrome virus, Triatoma virus, Theiler's encephalomyelitis virus, simian Virus 40, Solenopsis invicta virus 1, Rhopalosiphum padi virus, Reticuloendotheliosis virus, fuman poliovirus 1, Plautia stall intestine virus, Kashmir bee virus, Human rhinovirus 2 (HRV-2), Homalodisca coagulata virus-1, Human Immunodeficiency Virus type 1, Homalodisca coagulata virus-1, Himetobi P virus, Hepatitis C virus, Hepatitis A virus, Hepatitis GB virus, foot and mouth disease virus, Human enterovirus 71, Equine rhinitis virus, Ectropis obliqua picorna-like virus, Encephalomyocarditis virus (EMCV), Drosophila C Virus, Crucifer tobamo virus, Cricket paralysis virus, Bovine viral diarrhea virus 1, Black Queen Cell Virus, Aphid lethal paralysis virus, Avian encephalomyelitis virus (AEV), Acute bee paralysis virus, Hibiscus chlorotic ringspot virus, Classical swine fever virus, Human FGF2, Human SFTPA1, Human AML1/RUNX1, Drosophila antennapedia, Human AQP4, Human AT1 R, Human BAG-I, Human BCL2, Human BiP, Human c-IAPI, Human c-myc, Human eIF4G, Mouse NDST4 L, Human LEF1, Mouse HIF1 alpha, Human n.myc, Mouse Gtx, Human p27kipl, Human PDGF2/c-sis, Human p53, Human Pim-1, Mouse Rbm3, Drosophila reaper, Canine Scamper, Drosophila Ubx, Human UNR, Mouse UtrA, Human VEGF-A, Human XIAP, Salivirus, Cosavirus, Parechovirus, Drosophila hairless, S. cerevisiae TFIID, S. cerevisiae YAP1, Human c-src, Human FGF-1, Simian picomavirus, Turnip crinkle virus, Aichivirus, Crohivirus, Echovirus 11, an aptamer to eIF4G, Coxsackievirus B3 (CVB3) or Coxsackievirus A (CVB1/2). In yet another embodiment, the IRES is an IRES sequence of Coxsackievirus B3 (CVB3). In a further embodiment, the IRES is an IRES sequence of Encephalomyocarditis virus. In a further embodiment, the IRES is an IRES sequence of Theiler's encephalomyelitis virus.

[0218] The IRES sequence may have a modified sequence in comparison to the wild-type IRES sequence. In some embodiments, when the last nucleotide of the wild-type IRES is not a cytosine nucleic acid residue, the last nucleotide of the wild-type IRES sequence may be modified such that it is a cytosine residue. For example, the IRES sequence may be a CVB3 IRES sequence wherein the terminal adenosine residue is modified to cytosine residue. In some embodiments, the modified CVB3 IRES may have the nucleic acid sequence of:

(SEQ ID NO: 305)
TTAAAACAGCCTGTGGGTTGATCCCACCCACAGGCCCATTGGGCGCTAG
CACTCTGGTATCACGGTACCTTTGTGCGCCTGTTTTATACCCCCTCCCC
CAACTGTAACTTAGAAGTAACACACACCGATCAACAGTCAGCGTGGCAC
ACCAGCCACGTTTTGATCAAGCACTTCTGTTACCCCGGACTGAGTATCA
ATAGACTGCTCACGCGGTTGAAGGAGAAAGCGTTCGTTATCCGGCCAAC
TACTTCGAAAAACCTAGTAACACCGTGGAAGTTGCAGAGTGTTTCGCTC
AGCACTACCCCAGTGTAGATCAGGTCGATGAGTCACCGCATTCCCCACG
GGCGACCGTGGCGGTGGCTGCGTTGGCGGCCTGCCCATGGGGAAACCCA
TGGGACGCTCTAATACAGACATGGTGCGAAGAGTCTATTGAGCTAGTTG
GTAGTCCTCCGGCCCCTGAATGCGGCTAATCCTAACTGCGGAGCACACA
CCCTCAAGCCAGAGGGCAGTGTGTCGTAACGGGCAACTCTGCAGCGGAA
CCGACTACTTTGGGTGTCCGTGTTTCATTTTATTCCTATACTGGCTGCT
TATGGTGACAATTGAGAGATCGTTACCATATAGCTATTGGATTGGCCAT
CCGGTGACTAATAGAGCTATTATATATCCCTTTGTTGGGTTTATACCAC
TTAGCTTGAAAGAGGTTAAAACATTACAATTCATTGTTAAGTTGAATAC
AGCAAC

[0219] In some embodiments, the IRES sequence is an Enterovirus 71 (EV17) IRES. In some embodiments, the terminal guanosine residue of the EV17 IRES sequence is modified to a cytosine residue. In some embodiments, the modified EV71 IRES may have the nucleic acid sequence of:

(SEQ ID NO: 306)
TTAAAACAGCTGTGGGTTGTCACCCACCCACAGGGTCCACTGGGCGCTA
GTACACTGGTATCTCGGTACCTTTGTACGCCTGTTTTATACCCCCTCCC
TGATTTGCAACTTAGAAGCAACGCAAACCAGATCAATAGTAGGTGTGAC
ATACCAGTCGCATCTTGATCAAGCACTTCTGTATCCCCGGACCGAGTAT
CAATAGACTGTGCACACGGTTGAAGGAGAAAACGTCCGTTACCCGGCTA
ACTACTTCGAGAAGCCTAGTAACGCCATTGAAGTTGCAGAGTGTTTCGC
TCAGCACTCCCCCCGTGTAGATCAGGTCGATGAGTCACCGCATTCCCCA
CGGGCGACCGTGGCGGTGGCTGCGTTGGCGGCCTGCCTATGGGGTAACC
CATAGGACGCTCTAATACGGACATGGCGTGAAGAGTCTATTGAGCTAGT
TAGTAGTCCTCCGGCCCCTGAATGCGGCTAATCCTAACTGCGGAGCACA
TACCCTTAATCCAAAGGGCAGTGTGTCGTAACGGGCAACTCTGCAGCGG
AACCGACTACTTTGGGTGTCCGTGTTTCTTTTTATTCTTGTATTGGCTG
CTTATGGTGACAATTAAAGAATTGTTACCATATAGCTATTGGATTGGCC
ATCCAGTGTCAAACAGAGCTATTGTATATCTCTTTGTTGGATTCACACC
TCTCACTCTTGAAACGTTACACACCCTCAATTACATTATACTGCTGAAC
ACGAAGCGGCCACC

[0220] In some embodiments, the polyribonucleotide includes at least one IRES flanking at least one (e.g., 2, 3, 4, 5 or more) expression sequence. In some embodiments, the IRES flanks both sides of at least one (e.g., 2, 3, 4, 5 or more) expression sequence. In some embodiments, the polyribonucleotide includes one or more IRES sequences on one or both sides of each expression sequence, leading to separation of the resulting peptide(s) and or polypeptide(s). For example, a polyribonucleotide described herein may include a first IRES operably linked to a first expression sequence (e.g., encoding a first immunogen, such as a first coronavirus immunogen) and a second IRES operably linked to a second expression sequence (e.g., encoding a second immunogen, such as a second coronavirus immunogen).

[0221] In some embodiments, a polyribonucleotide described herein includes an IRES (e.g., an IRES operably linked to a coding region). For example, the polyribonucleotide may include any IRES as described in Chen et al. Mol. Cell 81(20):4300-4318, 2021; Jopling et al. Oncogene 20:2664-2670, 2001; Baranick et al. PNAS 105(12):4733-4738, 2008; Lang et al. Molecular Biology of the Cell 13(5):1792-1801, 2002; Dorokhov et al. PNAS 99(8):5301-5306, 2002; Wang et al. Nucleic Acids Research 33(7):2248-2258, 2005; Petz et al. Nucleic Acids Research 35(8):2473-2482, 2007, Chen et al. SCIENCE 268:415-417, 1995; Fan et al. NATURE COMMUNICATION 13(1):3751-3765, 2022, and International Publication No. WO2021/263124 each of which is hereby incorporated by reference in their entirety.

### Signal Sequences

[0222] In some embodiments, immunogens expressed from a circular or linear polyribonucleotide disclosed herein include a secreted protein, for example, a protein that naturally includes a signal sequence, or one that does not usually encode a signal sequence but is modified to contain one. In some embodiments, the immunogen(s) includes a secretion signal. For example, the secretion signal may be the naturally encoded secretion signal for a secreted protein. In another example, the secretion signal may be a modified secretion signal for a secreted protein. In other embodiments, the immunogen(s) do not include a secretion signal.

[0223] In some embodiments, a polyribonucleotide encodes multiple copies of the same immunogen (e.g., one, two, three, four, five, six, seven, eight, nine, ten, or more). In some embodiments, at least one copy of the immunogen includes a signal sequence and at least one copy of the immunogen does not include a signal sequence. In some embodiments, a circular polyribonucleotide encodes plurality of immunogens, where at least one of the plurality of immunogens includes a signal sequence and at least one copy of the plurality of immunogens does not include a signal sequence.

[0224] In some embodiments, the signal sequence is a wild-type signal sequence that is present on the N-terminus of the corresponding wild-type immunogen, e.g., when expressed endogenously. In some embodiments, the signal sequence is heterologous to the immunogen, e.g., is not present when the wild-type immunogen is expressed endogenously. A polyribonucleotide sequence encoding an immunogen may be modified to remove the nucleotide sequence encoding a wild-type signal sequence and/or add a sequence encoding a heterologous signal sequence.

[0225] The circular polyribonucleotide may further include one or more adjuvants, each with or without a signal sequence. In some embodiments, the circular polyribonucleotide encodes at least one adjuvant and at least one immunogen. In some embodiments, the at least one encoded adjuvant includes a signal sequence and the at least one encoded immunogen does not include a signal sequence. In some embodiments, the at least one encoded adjuvant includes a signal sequence and the at least one encoded immunogen includes a signal sequence. In some embodiments, the at least one encoded adjuvant does not include a signal sequence and the at least one encoded immunogen includes a signal sequence. In some embodiments, neither the encoded adjuvant nor the encoded immunogen includes a signal sequence.

[0226] In some embodiments, the signal sequence is a wild-type signal sequence that is present on the N-terminus of the corresponding wild-type adjuvant, e.g., when expressed endogenously. In some embodiments, the signal sequence is heterologous to the adjuvant, e.g., is not present when the wild-type adjuvant is expressed endogenously. A polyribonucleotide sequence encoding an adjuvant may be modified to remove the nucleotide sequence encoding a wild-type signal sequence and/or add a sequence encoding a heterologous signal sequence.

[0227] A polypeptide encoded by a polyribonucleotide (e.g., immunogen or an adjuvant encoded by a polyribonucleotide) may include a signal sequence that directs the immunogen or adjuvant to the secretory pathway. In some embodiments, the signal sequence may direct the immunogen or adjuvant to reside in certain organelles (e.g., the endoplasmic reticulum, Golgi apparatus, or endosomes). In some embodiments, the signal sequence directs the immunogen or adjuvant to be secreted from the cell. For secreted proteins, the signal sequence may be cleaved after secretion, resulting in a mature protein. In other embodiments, the signal sequence may become embedded in the membrane of the cell or certain organelles, creating a transmembrane segment that anchors the protein to the membrane of the cell, endoplasmic reticulum, or Golgi apparatus. In certain embodiments, the signal sequence of a transmembrane protein is a short sequence at the N-terminal of the polypeptide. In other embodiments, the first transmembrane domain acts as the first signal sequence, which targets the protein to the membrane.

[0228] In some embodiments, the secretion signal is human interleukin-2 (IL-2) secretion signal. In some embodiments, the IL-2 secretion signal has an amino acid sequence of at least 90% sequence identity to MYRMQLLSCIALSLALVTNS (SEQ ID NO: 199). In some embodiments, the IL2 secretion signal has an amino acid sequence of at least 95% sequence identity to SEQ ID NO: 199. In some embodiments, the IL-2 secretion signal has an amino acid sequence of at least 99% sequence identity to SEQ ID NO: 199. In some embodiments, the IL-2 secretion signal has an amino acid sequence of 100% sequence identity to SEQ ID NO: 199.

[0229] In some embodiments, the secretion signal is Gaussia luciferase secretion signal. In some embodiments, the Gaussia luciferase secretion signal has an amino acid sequence of at least 90% sequence identity of MGVKVLFALICIAVAEAK (SEQ ID NO: 198). In some embodiments, the Gaussia luciferase secretion signal has an amino acid sequence of at least 95% sequence identity of SEQ ID NO: 198. In some embodiments, the Gaussia luciferase secretion signal has an amino acid sequence of at least 99% sequence identity of SEQ ID NO: 198. In some embodiments, the Gaussia luciferase secretion signal has an amino acid sequence of 100% sequence identity of SEQ ID NO: 198.

[0230] In some embodiments, the secretion signal is an EPO (e.g., a human EPO) secretion signal. In some embodiments, the EPO secretion signal has an amino acid sequence of at least 90% sequence identity of MGVHECPAWLWLLLSLLSLPLGLPVLGA (SEQ ID NO: 197). In some embodiments, the EPO secretion signal has an amino acid sequence of at least 95% sequence identity of SEQ ID NO: 197. In some embodiments, the EPO secretion signal has an amino acid sequence of at least 99% sequence identity of SEQ ID NO: 197. In some embodiments, the EPO secretion signal has an amino acid sequence of 100% sequence identity of SEQ ID NO: 197.

[0231] In some embodiments, the secretion signal is a wildtype SARS-CoV-2 secretion signal. In some embodiments, the wildtype SARS-CoV-2 secretion signal has an amino acid sequence of at least 90% sequence identity of MFVFLVLLPLVSS (SEQ ID NO: 200). In some embodiments, the wildtype SARS-CoV-2 secretion signal has an amino acid sequence of at least 95% sequence identity of SEQ ID NO: 200. In some embodiments, the wildtype SARS-CoV-2 secretion signal has an amino acid sequence of at least 99% sequence identity of SEQ ID NO: 200. In some embodiments, the wildtype SARS-CoV-2 secretion signal has an amino acid sequence of 100% sequence identity of SEQ ID NO: 200.

[0232] In some embodiments, an adjuvant encoded by a polyribonucleotide includes a secretion signal sequence. In some embodiments, an immunogen encoded by a polyribonucleotide includes either a secretion signal sequence, a transmembrane insertion signal sequence, or does not include a signal sequence.

### Regulatory Elements

[0233] A regulatory element may include a sequence that is located adjacent to an expression sequence that encodes an expression product. A regulatory element may be operably linked to the adjacent sequence. A regulatory element may increase an amount of product expressed as compared to an amount of the expressed product when no regulatory element is present. A regulatory element may be used to increase the expression of one or more immunogen(s) and/or adjuvant(s) encoded by a polyribonucleotide. Likewise, a regulatory element may be used to decrease the expression of one or more immunogen(s) and/or adjuvant(s) encoded by a polyribonucleotide. In some embodiments, a regulatory element may be used to increase expression of an immunogen and/or adjuvant and another regulatory element may be used to decrease expression of another immunogen and/or adjuvant on the same polyribonucleotide. In addition, one regulatory element can increase an amount of product (e.g., an immunogen or adjuvants) expressed for multiple expression sequences attached in tandem. Hence, one regulatory element can enhance the expression of one or more expression sequences (e.g., immunogens or adjuvants). Multiple regulatory elements can also be used, for example, to differentially regulate expression of different expression sequences.

[0234] In some embodiments, a regulatory element as provided herein can include a selective translation sequence. As used herein, the term “selective translation sequence” refers to a nucleic acid sequence that selectively initiates or activates translation of an expression sequence in the polyribonucleotide, for instance, certain riboswitch aptazymes. A regulatory element can also include a selective degradation sequence. As used herein, the term “selective degradation sequence” refers to a nucleic acid sequence that initiates degradation of the polyribonucleotide, or an expression product of the polyribonucleotide. In some embodiments, the regulatory element is a translation modulator. A translation modulator can modulate translation of the expression sequence in the polyribonucleotide. A translation modulator can be a translation enhancer or suppressor. In some embodiments, a translation initiation sequence can function as a regulatory element.

[0235] In some embodiments, a polyribonucleotide produces stoichiometric ratios of expression products. Rolling circle translation continuously produces expression products at substantially equivalent ratios. In some embodiments, the polyribonucleotide has a stoichiometric translation efficiency, such that expression products are produced at substantially equivalent ratios. In some embodiments, the polyribonucleotide has a stoichiometric translation efficiency of multiple expression products, e.g., products from 2, 3, 4, 5, 6, 7, 8, 9, 10, 11, 12, or more expression sequences. In some embodiments, the polyribonucleotide produces substantially different ratios of expression products. For example, the translation efficiency of multiple expression products may have a ratio of 1:10,000; 1:7000, 1:5000, 1:1000, 1:700, 1:500, 1:100, 1:50, 1:10, 1:5, 1:4, 1:3 or 1:2. In some embodiments, the ratio of multiple expression products may be modified using a regulatory element.

[0236] Further examples of regulatory elements are described in paragraphs [0154]-[0161] of International Patent Publication No. WO2019/118919, which is hereby incorporated by reference in its entirety.

### Cleavage Domains

[0237] A circular or linear polyribonucleotide of the disclosure can include a cleavage domain (e.g., a stagger element or a cleavage sequence).

[0238] As used herein, the term “stagger element” is a moiety, such as a nucleotide sequence, that induces ribosomal pausing during translation. In some embodiments, the stagger element is a non-conserved sequence of amino-acids with a strong alpha-helical propensity followed by the consensus sequence -D(V/I)ExNPG P (SEQ ID NO: 52), where x=any amino acid. In some embodiments, the stagger element may include a chemical moiety, such as glycerol, a non-nucleic acid linking moiety, a chemical modification, a modified nucleic acid, or any combination thereof. In some embodiments, a circular or linear polyribonucleotide includes at least one stagger element adjacent to an expression sequence, such as a sequence encoding a coronavirus immunogen. In some embodiments, the circular or linear polyribonucleotide includes a stagger element adjacent to each expression sequence. In some embodiments, the stagger element is present on one or both sides of each expression sequence, leading to separation of the expression products, e.g., immunogen(s) and/or adjuvant(s). In some embodiments, the stagger element is a portion of the one or more expression sequences. In some embodiments, the circular or linear polyribonucleotide includes one or more expression sequences (e.g., immunogen(s) and/or adjuvant(s)), and each of the one or more expression sequences is separated from a succeeding expression sequence (e.g., immunogen(s) and/or adjuvant(s) by a stagger element on the circular or linear polyribonucleotide. In some embodiments, the stagger element prevents generation of a single polypeptide (a) from two rounds of translation of a single expression sequence or (b) from one or more rounds of translation of two or more expression sequences. In some embodiments, the stagger element is a sequence separate from the one or more expression sequences. In some embodiments, the stagger element includes a portion of an expression sequence of the one or more expression sequences.

[0239] Examples of stagger elements are described in paragraphs [0172]-[0175] of International Patent Publication No. WO2019/118919, which is hereby incorporated by reference in its entirety.

[0240] In some embodiments, the plurality of immunogens and/or adjuvants encoded by a circular ribonucleotide may be separated by an IRES between each immunogen (e.g., each immunogen is operably linked to a separate IRES). For example, a circular polyribonucleotide may include a first IRES operable linked to a first expression sequence and a second IRES operably linked to a second expression sequence. The IRES may be the same IRES between all immunogens. The IRES may be different between different immunogens.

[0241] In some embodiments, the plurality of immunogens and/or adjuvants may be separated by a 2A self-cleaving peptide. For example, a circular polyribonucleotide may encode an IRES operably linked to an open reading frame encoding a first immunogen, a 2A, and a second immunogen. In some embodiments, the 2A may have a sequence of GSGATNFSLLKQAGDVEENPGP (SEQ ID NO: 202).

[0242] In some embodiments, the plurality of immunogens and/or adjuvants may be separated by a protease cleavage site (e.g., a furin cleavage site). For example, a circular polyribonucleotide may encode an IRES operably linked to an open reading frame encoding a first immunogen, a protease cleavage site (e.g., a furin cleavage site), and a second immunogen. In some embodiments, the furin cleavage site may have a sequence of GRLRR (SEQ ID NO: 201). In some embodiments, the furin cleavage site may have a sequence of GRLRR (SEQ ID NO: 203).

[0243] In some embodiments, the plurality of immunogens and/or adjuvants may be separated by a 2A self-cleaving peptide and a protease cleavage site (e.g., a furin cleavage site). For example, a circular polyribonucleotide may encode an IRES operably linked to an open reading frame encoding a first immunogen, a 2A, a protease cleavage site (e.g., a furin cleavage site), and a second immunogen. A circular polyribonucleotide may also encode an IRES operably linked to an open reading frame encoding a first immunogen, a protease cleavage site (e.g., a furin cleavage site), a 2A, and a second immunogen. A tandem 2A and furin cleavage site may be referred to as a furin-2A (which includes furin-2A or 2A-furin, arranged in either orientation).

[0244] Furthermore, the plurality of immunogens and/or adjuvants encoded by the circular ribonucleotide may be separated by both IRES and 2A sequences. For example, an IRES may be between one immunogen and/or adjuvant and a second immunogen and/or adjuvant while a 2A peptide may be between the second immunogen and/or adjuvant and the third immunogen and/or adjuvant. The selection of a particular IRES or 2A self-cleaving peptide may be used to control the expression level of immunogen and/or adjuvant under control of the IRES or 2A sequence. For example, depending on the IRES and or 2A peptide selected, expression on the polypeptide may be higher or lower. To avoid production of a continuous expression product, e.g., immunogen and/or adjuvant, while maintaining rolling circle translation, a stagger element may be included to induce ribosomal pausing during translation. In some embodiments, the stagger element is at 3′ end of at least one of the one or more expression sequences. The stagger element can be configured to stall a ribosome during rolling circle translation of the circular or linear polyribonucleotide. The stagger element may include, but is not limited to a 2A-like, or CHYSEL (SEQ ID NO: 175) (cis-acting hydrolase element) sequence. In some embodiments, the stagger element encodes a sequence with a C-terminal consensus sequence that is X₁X₂X₃EX₅NPGP, where X₁ is absent or G or H, X₂ is absent or D or G, X₃ is D or V or I or S or M, and X₅ is any amino acid (SEQ ID NO: 176). Some non-limiting examples of stagger elements includes GDVESNPGP (SEQ ID NO: 177), GDIEENPGP (SEQ ID NO: 178), VEPNPGP (SEQ ID NO: 179), IETNPGP (SEQ ID NO: 180), GDIESNPGP (SEQ ID NO: 181), GDVELNPGP (SEQ ID NO: 182), GDIETNPGP (SEQ ID NO: 183), GDVENPGP (SEQ ID NO: 184), GDVEENPGP (SEQ ID NO: 185), GDVEQNPGP (SEQ ID NO: 186), IESNPGP (SEQ ID NO: 187), GDIELNPGP (SEQ ID NO: 188), HDIETNPGP (SEQ ID NO: 189), HDVETNPGP (SEQ ID NO: 190), HDVEMNPGP (SEQ ID NO: 191), GDMESNPGP (SEQ ID NO: 192), GDVETNPGP (SEQ ID NO: 193), GDIEQNPGP (SEQ ID NO: 194), and DSEFNPGP (SEQ ID NO: 195).

[0245] In some embodiments, a stagger element described herein cleaves an expression product, such as between G and P of the consensus sequence described herein. As one non-limiting example, the circular or linear polyribonucleotide includes at least one stagger element to cleave the expression product. In some embodiments, the circular or linear polyribonucleotide includes a stagger element adjacent to at least one expression sequence. In some embodiments, the circular or linear polyribonucleotide includes a stagger element after each expression sequence. In some embodiments, the circular or linear polyribonucleotide includes a stagger element is present on one or both sides of each expression sequence, leading to translation of individual peptide(s) and or polypeptide(s) from each expression sequence.

[0246] In some embodiments, a stagger element includes one or more modified nucleotides or unnatural nucleotides that induce ribosomal pausing during translation. Unnatural nucleotides may include peptide nucleic acid (PNA), Morpholino and locked nucleic acid (LNA), as well as glycol nucleic acid (GNA) and threose nucleic acid (TNA). Examples such as these are distinguished from naturally occurring DNA or RNA by changes to the backbone of the molecule. Exemplary modifications can include any modification to the sugar, the nucleobase, the internucleoside linkage (e.g., to a linking phosphate/to a phosphodiester linkage/to the phosphodiester backbone), and any combination thereof that can induce ribosomal pausing during translation. Some of the exemplary modifications provided herein are described elsewhere herein.

[0247] In some embodiments, a stagger element is present in a circular or linear polyribonucleotide in other forms. For example, in some exemplary circular or linear polyribonucleotides, a stagger element includes a termination element of a first expression sequence in the circular or linear polyribonucleotide, and a nucleotide spacer sequence that separates the termination element from a first translation initiation sequence of an expression succeeding the first expression sequence. In some examples, the first stagger element of the first expression sequence is upstream of (5′ to) a first translation initiation sequence of the expression succeeding the first expression sequence in the circular or linear polyribonucleotide. In some cases, the first expression sequence and the expression sequence succeeding the first expression sequence are two separate expression sequences in the circular or linear polyribonucleotide. The distance between the first stagger element and the first translation initiation sequence can enable continuous translation of the first expression sequence and its succeeding expression sequence. In some embodiments, the first stagger element includes a termination element and separates an expression product of the first expression sequence from an expression product of its succeeding expression sequences, thereby creating discrete expression products. In some cases, the circular or linear polyribonucleotide including the first stagger element upstream of the first translation initiation sequence of the succeeding sequence in the circular or linear polyribonucleotide is continuously translated, while a corresponding circular or linear polyribonucleotide including a stagger element of a second expression sequence that is upstream of a second translation initiation sequence of an expression sequence succeeding the second expression sequence is not continuously translated. In some cases, there is only one expression sequence in the circular or linear polyribonucleotide, and the first expression sequence and its succeeding expression sequence are the same expression sequence. In some exemplary circular or linear polyribonucleotides, a stagger element includes a first termination element of a first expression sequence in the circular or linear polyribonucleotide, and a nucleotide spacer sequence that separates the termination element from a downstream translation initiation sequence. In some such examples, the first stagger element is upstream of (5′ to) a first translation initiation sequence of the first expression sequence in the circular or linear polyribonucleotide. In some cases, the distance between the first stagger element and the first translation initiation sequence enables continuous translation of the first expression sequence and any succeeding expression sequences. In some embodiments, the first stagger element separates one round expression product of the first expression sequence from the next round expression product of the first expression sequences, thereby creating discrete expression products. In some cases, the circular or linear polyribonucleotide including the first stagger element upstream of the first translation initiation sequence of the first expression sequence in the circular or linear polyribonucleotide is continuously translated, while a corresponding circular or linear polyribonucleotide including a stagger element upstream of a second translation initiation sequence of a second expression sequence in the corresponding circular or linear polyribonucleotide is not continuously translated. In some cases, the distance between the second stagger element and the second translation initiation sequence is at least 2×, 3×, 4×, 5×, 6×, 7×, 8×, 9×, or 10× greater in the corresponding circular or linear polyribonucleotide than a distance between the first stagger element and the first translation initiation in the circular or linear polyribonucleotide. In some cases, the distance between the first stagger element and the first translation initiation is at least 2 nt, 3 nt, 4 nt, 5 nt, 6 nt, 7 nt, 8 nt, 9 nt, 10 nt, 11 nt, 12 nt, 13 nt, 14 nt, 15 nt, 16 nt, 17 nt, 18 nt, 19 nt, 20 nt, 25 nt, 30 nt, 35 nt, 40 nt, 45 nt, 50 nt, 55 nt, 60 nt, 65 nt, 70 nt, 75 nt, or greater. In some embodiments, the distance between the second stagger element and the second translation initiation is at least 2 nt, 3 nt, 4 nt, 5 nt, 6 nt, 7 nt, 8 nt, 9 nt, 10 nt, 11 nt, 12 nt, 13 nt, 14 nt, 15 nt, 16 nt, 17 nt, 18 nt, 19 nt, 20 nt, 25 nt, 30 nt, 35 nt, 40 nt, 45 nt, 50 nt, 55 nt, 60 nt, 65 nt, 70 nt, 75 nt, or greater than the distance between the first stagger element and the first translation initiation. In some embodiments, the circular or linear polyribonucleotide includes more than one expression sequence.

[0248] In some embodiments, a circular or linear polyribonucleotide includes at least one cleavage sequence. In some embodiments, the cleavage sequence is adjacent to an expression sequence. In some embodiments, the cleavage sequence is between two expression sequences. In some embodiments, cleavage sequence is included in an expression sequence. In some embodiments, the circular or linear polyribonucleotide includes between 2 and 10 cleavage sequences. In some embodiments, the circular or linear polyribonucleotide includes between 2 and 5 cleavage sequences. In some embodiments, the multiple cleavage sequences are between multiple expression sequences; for example, a circular or linear polyribonucleotide may include three expression sequences two cleavage sequences such that there is a cleavage sequence in between each expression sequence. In some embodiments, the circular or linear polyribonucleotide includes a cleavage sequence, such as in an immolating circRNA or cleavable circRNA or self-cleaving circRNA. In some embodiments, the circular or linear polyribonucleotide includes two or more cleavage sequences, leading to separation of the circular or linear polyribonucleotide into multiple products, e.g., miRNAs, linear RNAs, smaller circular or linear polyribonucleotide, etc.

[0249] In some embodiments, a cleavage sequence includes a ribozyme RNA sequence. A ribozyme (from ribonucleic acid enzyme, also called RNA enzyme or catalytic RNA) is an RNA molecule that catalyzes a chemical reaction. Many natural ribozymes catalyze either the hydrolysis of one of their own phosphodiester bonds, or the hydrolysis of bonds in other RNA, but they have also been found to catalyze the aminotransferase activity of the ribosome. Catalytic RNA can be “evolved” by in vitro methods. Similar to riboswitch activity discussed above, ribozymes and their reaction products can regulate gene expression. In some embodiments, a catalytic RNA or ribozyme can be placed within a larger non-coding RNA such that the ribozyme is present at many copies within the cell for the purposes of chemical transformation of a molecule from a bulk volume. In some embodiments, aptamers and ribozymes can both be encoded in the same non-coding RNA.

[0250] In some embodiments, the cleavage sequence encodes a cleavable polypeptide linker. For example, a polyribonucleotide may encode two or more immunogens, e.g., where the two or more immunogens are encoded by a single open-reading frame (ORF). For example, two or more immunogens may be encoded by a single open-reading frame, the expression of which is controlled by an IRES. In some embodiments, the ORF further encodes a polypeptide linker, e.g., such that the expression product of the ORF encodes two or more immunogens each separated by a sequence encoding a polypeptide linker (e.g., a linker of 5-200, 5 to 100, 5 to 50, 5 to 20, 50 to 100, or 50 to 200 amino acids). The polypeptide linker may include a cleavage site, for example, a cleavage site recognized and cleaved by a protease (e.g., an endogenous protease in a subject following administration of the polyribonucleotide to that subject). In such embodiments, a single expression product including the amino acid sequence of two or more immunogens is cleaved upon expression, such that the two or more immunogens are separated following expression. Exemplary protease cleavage sites are known to those of skill in the art, for example, amino acid sequences that act as protease cleavage sites recognized by a metalloproteinase (e.g., a matrix metalloproteinase (MMP), such as any one or more of MMPs 1-28), a disintegrin and metalloproteinase (ADAM, such as any one or more of ADAMs 2, 7-12, 15, 17-23, 28-30 and 33), a serine protease, urokinase-type plasminogen activator, matriptase, a cysteine protease, an aspartic protease, or a cathepsin protease. In some embodiments, the protease is MMP9 or MMP2. In some embodiments, the protease is matriptase.

[0251] In some embodiments, a circular or linear polyribonucleotide described herein is an immolating circular or linear polyribonucleotide, a cleavable circular or linear polyribonucleotide, or a self-cleaving circular or linear polyribonucleotide. A circular or linear polyribonucleotide can deliver cellular components including, for example, RNA, lncRNA, lincRNA, miRNA, tRNA, rRNA, snoRNA, ncRNA, siRNA, or shRNA. In some embodiments, a circular or linear polyribonucleotide includes miRNA separated by (i) self-cleavable elements; (ii) cleavage recruitment sites; (iii) degradable linkers; (iv) chemical linkers; and/or (v) spacer sequences. In some embodiments, circRNA includes siRNA separated by (i) self-cleavable elements; (ii) cleavage recruitment sites (e.g., ADAR); (iii) degradable linkers (e.g., glycerol); (iv) chemical linkers; and/or (v) spacer sequences. Non-limiting examples of self-cleavable elements include hammerhead, splicing element, hairpin, hepatitis delta virus (HDV), Varkud Satellite (VS), and g/mS ribozymes.

[0252] In some embodiments, the circular polyribonucleotide includes at least one stagger element adjacent to an expression sequence. In some embodiments, the circular polyribonucleotide includes a stagger element adjacent to each expression sequence. In some embodiments, the stagger element is present on one or both sides of each expression sequence, leading to separation of the expression products, e.g., peptide(s) and/or polypeptide(s). In some embodiments, the stagger element is a portion of the one or more expression sequences. In some embodiments, the circular polyribonucleotide comprises one or more expression sequences, and each of the one or more expression sequences is separated from a succeeding expression sequence by a stagger element on the circular polyribonucleotide. In some embodiments, the stagger element prevents generation of a single polypeptide (a) from two rounds of translation of a single expression sequence or (b) from one or more rounds of translation of two or more expression sequences. In some embodiments, the stagger element is a sequence separate from the one or more expression sequences. In some embodiments, the stagger element comprises a portion of an expression sequence of the one or more expression sequences.

[0253] Examples of stagger elements are described in paragraphs [0172]-[0175] of WO2019/118919, which is hereby incorporated by reference in its entirety.

### Translation Initiation Sequences

[0254] In some embodiments, a circular or linear polyribonucleotide encodes an immunogen and includes a translation initiation sequence, e.g., a start codon. In some embodiments, the circular polyribonucleotide encodes an immunogen that produces the human polyclonal antibodies of interest and comprises a translation initiation sequence, e.g., a start codon. In some embodiments, the translation initiation sequence includes a Kozak or Shine-Dalgarno sequence. In some embodiments, the translation initiation sequence includes a Kozak sequence. In some embodiments, the circular or linear polyribonucleotide includes the translation initiation sequence, e.g., Kozak sequence, adjacent to an expression sequence. In some embodiments, the translation initiation sequence is a non-coding start codon. In some embodiments, the translation initiation sequence, e.g., Kozak sequence, is present on one or both sides of each expression sequence, leading to separation of the expression products. In some embodiments, the circular or linear polyribonucleotide includes at least one translation initiation sequence adjacent to an expression sequence. In some embodiments, the translation initiation sequence provides conformational flexibility to the circular or linear polyribonucleotide. In some embodiments, the translation initiation sequence is within a substantially single stranded region of the circular or linear polyribonucleotide. Further examples of translation initiation sequences are described in paragraphs [0163]-[0165] of International Patent Publication No. WO2019/118919, which is hereby incorporated by reference in its entirety.

[0255] The circular or linear polyribonucleotide may include more than 1 start codon such as, but not limited to, at least 2, at least 3, at least 4, at least 5, at least 6, at least 7, at least 8, at least 9, at least 10, at least 11, at least 12, at least 13, at least 14, at least 15, at least 16, at least 17, at least 18, at least 19, at least 20, at least 25, at least 30, at least 35, at least 40, at least 50, at least 60 or more than 60 start codons. Translation may initiate on the first start codon or may initiate downstream of the first start codon.

[0256] In some embodiments, a circular or linear polyribonucleotide may initiate at a codon which is not the first start codon, e.g., AUG. Translation of the circular or linear polyribonucleotide may initiate at an alternative translation initiation sequence, such as those described in [0164] of International Patent Publication No. WO2019/118919A1, which is incorporated herein by reference in its entirety.

[0257] In some embodiments, translation is initiated by eukaryotic initiation factor 4A (eIF4A) treatment with Rocaglates (translation is repressed by blocking 43S scanning, leading to premature, upstream translation initiation and reduced protein expression from transcripts bearing the RocA-eIF4A target sequence, see for example, nature.com/articles/naturel7978).

### Untranslated Regions

[0258] In some embodiments, a circular or linear polyribonucleotide includes untranslated regions (UTRs). UTRs of a genomic region including a gene may be transcribed but not translated. In some embodiments, a UTR may be included upstream of the translation initiation sequence of an expression sequence described herein. In some embodiments, a UTR may be included downstream of an expression sequence described herein. In some instances, one UTR for the first expression sequence is the same as or continuous with or overlapping with another UTR for a second expression sequence. In some embodiments, the intron is a human intron. In some embodiments, the intron is a full-length human intron, e.g., ZKSCAN1.

[0259] Exemplary untranslated regions are described in paragraphs [0197]-[201] of International Patent Publication No. WO2019/118919, which is hereby incorporated by reference in its entirety.

[0260] In some embodiments, a circular polyribonucleotide includes a poly-A sequence. Exemplary poly-A sequences are described in paragraphs [0202]-[0205] of International Patent Publication No. WO2019/118919, which is hereby incorporated by reference in its entirety. In some embodiments, a circular polyribonucleotide lacks a poly-A sequence.

[0261] In some embodiments, a circular or linear polyribonucleotide includes a UTR with one or more stretches of Adenosines and Uridines embedded within. These AU rich signatures may increase turnover rates of the expression product.

[0262] Introduction, removal, or modification of UTR AU rich elements (AREs) may be useful to modulate the stability, or immunogenicity (e.g., the level of one or more markers of an immune or inflammatory response) of the circular or linear polyribonucleotide. When engineering specific circular polyribonucleotides, one or more copies of an ARE may be introduced to the circular polyribonucleotide and the copies of an ARE may modulate translation and/or production of an expression product. Likewise, AREs may be identified and removed or engineered into the circular polyribonucleotide to modulate the intracellular stability and thus affect translation and production of the resultant protein.

[0263] It should be understood that any UTR from any gene may be incorporated into the respective flanking regions of the circular polyribonucleotide.

[0264] In some embodiments, a circular polyribonucleotide lacks a 5′-UTR and is competent for protein expression from its one or more expression sequences. In some embodiments, the circular or linear polyribonucleotide lacks a 3′-UTR and is competent for protein expression from its one or more expression sequences. In some embodiments, the circular or linear polyribonucleotide lacks a poly-A sequence and is competent for protein expression from its one or more expression sequences. In some embodiments, the circular or linear polyribonucleotide lacks a termination element and is competent for protein expression from its one or more expression sequences. In some embodiments, the circular or linear polyribonucleotide lacks an internal ribosomal entry site and is competent for protein expression from its one or more expression sequences. In some embodiments, the circular or linear polyribonucleotide lacks a cap and is competent for protein expression from its one or more expression sequences. In some embodiments, the circular or linear polyribonucleotide lacks a 5′-UTR, a 3′-UTR, and an IRES, and is competent for protein expression from its one or more expression sequences. In some embodiments, the circular or linear polyribonucleotide includes one or more of the following sequences: a sequence that encodes one or more miRNAs, a sequence that encodes one or more replication proteins, a sequence that encodes an exogenous gene, a sequence that encodes a therapeutic, a regulatory element (e.g., translation modulator, e.g., translation enhancer or suppressor), a translation initiation sequence, one or more regulatory nucleic acids that targets endogenous genes (e.g., siRNA, lncRNAs, shRNA), and a sequence that encodes a therapeutic mRNA or protein.

[0265] In some embodiments, a circular or linear polyribonucleotide lacks a 5′-UTR. In some embodiments, the circular polyribonucleotide lacks a 3′-UTR. In some embodiments, the circular polyribonucleotide lacks a poly-A sequence. In some embodiments, the circular or linear polyribonucleotide lacks a termination element. In some embodiments, the circular or linear polyribonucleotide lacks an internal ribosomal entry site. In some embodiments, the circular or linear polyribonucleotide lacks degradation susceptibility by exonucleases. In some embodiments, the fact that the circular polyribonucleotide lacks degradation susceptibility can mean that the circular polyribonucleotide is not degraded by an exonuclease, or only degraded in the presence of an exonuclease to a limited extent, e.g., that is comparable to or similar to in the absence of exonuclease. In some embodiments, the circular polyribonucleotide is not degraded by exonucleases. In some embodiments, the circular polyribonucleotide has reduced degradation when exposed to exonuclease. In some embodiments, the circular polyribonucleotide lacks binding to a cap-binding protein. In some embodiments, the circular polyribonucleotide lacks a 5′ cap.

### Termination Elements

[0266] In some embodiments, the polyribonucleotide described herein includes at least one termination element. In some embodiments, the polyribonucleotide includes a termination element operably linked to an expression sequence. In some embodiments, the polynucleotide lacks a termination element.

[0267] In some embodiments, the polyribonucleotide includes one or more expression sequences, and each expression sequence may or may not have a termination element. In some embodiments, the polyribonucleotide includes one or more expression sequences, and the expression sequences lack a termination element, such that the polyribonucleotide is continuously translated. Exclusion of a termination element may result in rolling circle translation or continuous expression of expression product.

[0268] In some embodiments, the circular polyribonucleotide includes one or more expression sequences, and each expression sequence may or may not have a termination element. In some embodiments, the circular polyribonucleotide includes one or more expression sequences, and the expression sequences lack a termination element, such that the circular polyribonucleotide is continuously translated. Exclusion of a termination element may result in rolling circle translation or continuous expression of expression product, e.g., peptides or polypeptides, due to lack of ribosome stalling or fall-off. In such an embodiment, rolling circle translation expresses a continuous expression product through each expression sequence. In some other embodiments, a termination element of an expression sequence can be part of a stagger element. In some embodiments, one or more expression sequences in the circular polyribonucleotide includes a termination element. However, rolling circle translation or expression of a succeeding (e.g., second, third, fourth, fifth, etc.) expression sequence in the circular polyribonucleotide is performed. In such instances, the expression product may fall off the ribosome when the ribosome encounters the termination element, e.g., a stop codon, and terminates translation. In some embodiments, translation is terminated while the ribosome, e.g., at least one subunit of the ribosome, remains in contact with the circular polyribonucleotide.

[0269] In some embodiments, the circular polyribonucleotide includes a termination element at the end of one or more expression sequences. In some embodiments, one or more expression sequences includes two or more termination elements in succession. In such embodiments, translation is terminated and rolling circle translation is terminated. In some embodiments, the ribosome completely disengages with the circular polyribonucleotide. In some such embodiments, production of a succeeding (e.g., second, third, fourth, fifth, etc.) expression sequence in the circular polyribonucleotide may require the ribosome to reengage with the circular polyribonucleotide prior to initiation of translation. Generally, termination elements include an in-frame nucleotide triplet that signals termination of translation (e.g., UAA, UGA, UAG). In some embodiments, one or more termination elements in the circular polyribonucleotide are frame-shifted termination elements, such as but not limited to, off-frame or −1 and +1 shifted reading frames (e.g., hidden stop) that may terminate translation. Frame-shifted termination elements include nucleotide triples, TAA, TAG, and TGA that appear in the second and third reading frames of an expression sequence. Frame-shifted termination elements may be important in preventing misreads of mRNA, which is often detrimental to the cell. In some embodiments, the termination element is a stop codon.

[0270] In some embodiments, an expression sequence includes a poly-A sequence (e.g., at the 3′ end of an expression sequence, for example 3′ to a termination element). In some embodiments, the length of a poly-A sequence is greater than 10 nucleotides in length. In one embodiment, the poly-A sequence is greater than 15 nucleotides in length (e.g., at least or greater than about 10, 15, 20, 25, 30, 35, 40, 45, 50, 55, 60, 70, 80, 90, 100, 120, 140, 160, 180, 200, 250, 300, 350, 400, 450, 500, 600, 700, 800, 900, 1,000, 1,100, 1,200, 1,300, 1,400, 1,500, 1,600, 1,700, 1,800, 1,900, 2,000, 2,500, and 3,000 nucleotides). In some embodiments, the poly-A sequence is designed according to the descriptions of the poly-A sequence in [0202]-[0204] of International Patent Publication No. WO2019/118919A1, which is incorporated herein by reference in its entirety. In some embodiments, the expression sequence lacks a poly-A sequence (e.g., at the 3′ end of an expression sequence).

[0271] In some embodiments, a circular polyribonucleotide includes a polyA, lacks a polyA, or has a modified polyA to modulate one or more characteristics of the circular polyribonucleotide. In some embodiments, the circular polyribonucleotide lacking a polyA or having modified polyA improves one or more functional characteristics, e.g., immunogenicity (e.g., the level of one or more marker of an immune or inflammatory response), half-life, and/or expression efficiency.

[0272] Further examples of termination elements are described in paragraphs [0169]-[0170] of International Patent Publication No. WO2019/118919, which is hereby incorporated by reference in its entirety.

### Spacer Sequences

[0273] In some embodiments, a polyribonucleotide described herein includes a spacer sequence. In some embodiments, a polyribonucleotide described herein includes one or more spacer sequences. A spacer refers to any contiguous nucleotide sequence (e.g., of one or more nucleotides) that provides distance or flexibility between two adjacent polynucleotide regions. Spacers may be present in between any of the nucleic acid elements described herein. Spacer may also be present within a nucleic acid element described herein.

[0274] The spacer may be, e.g., at least 5 (e.g., at least 10, at least 15, at least 20) ribonucleotides in length. In some embodiments, each spacer region is at least 5 (e.g., at least 10, at least 15, at least 20) ribonucleotides in length. Each spacer region may be, e.g., from 5 to 500 (e.g., 10, 20, 30, 40, 50, 60, 70, 80, 90, 100, 150, 200, 250, 300, 350, 400, 450, or 500) ribonucleotides in length. The first spacer region, the second spacer region, or the first spacer region and the second spacer region may include a polyA sequence. The first spacer region, the second spacer region, or the first spacer region and the second spacer region may include a polyA-C sequence. In some embodiments, the first spacer region, the second spacer region, or the first spacer region and the second spacer region includes a polyA-G sequence. In some embodiments, the first spacer region, the second spacer region, or the first spacer region and the second spacer region includes a polyA-T sequence. In some embodiments, the first spacer region, the second spacer region, or the first spacer region and the second spacer region includes a random sequence.

[0275] In some embodiments, the spacer sequence can be, for example, at least 10 nucleotides in length, at least 15 nucleotides in length, or at least 30 nucleotides in length. In some embodiments, the spacer sequence is at least 7, 8, 9, 10, 11, 12, 13, 14, 15, 16, 17, 18, 19, 20, 25 or 30 nucleotides in length. In some embodiments, the spacer sequence is no more than 100, 90, 80, 70, 60, 50, 45, 40, 35 or 30 nucleotides in length. In some embodiments the spacer sequence is from 20 to 50 nucleotides in length. In certain embodiments, the spacer sequence is 10, 11, 12, 13, 14, 15, 16, 17, 18, 19, 20, 21, 22, 23, 24, 25, 26, 27, 28, 29, 30, 31, 32, 33, 34, 35, 36, 37, 38, 39, 40, 41, 42, 43, 44, 45, 46, 47, 48, 49 or 50 nucleotides in length.

[0276] The spacer sequences can be polyA sequences, polyA-C sequences, polyC sequences, or poly-U sequences.

[0277] In some embodiments, the spacer sequences can be polyA-T, polyA-C, polyA-G, or a random sequence.

[0278] Exemplary spacer sequences are described in paragraphs [0293]-[0302] of International Patent Publication No. WO2019/118919, which is hereby incorporated by reference in its entirety.

### Modifications

[0279] A polyribonucleotide may include one or more substitutions, insertions and/or additions, deletions, and covalent modifications with respect to reference sequences, in particular, the parent polyribonucleotide, are included within the scope of this disclosure.

[0280] In some embodiments, a polyribonucleotide includes one or more post-transcriptional modifications (e.g., capping, cleavage, polyadenylation, splicing, poly-A sequence, methylation, acylation, phosphorylation, methylation of lysine and arginine residues, acetylation, and nitrosylation of thiol groups and tyrosine residues, etc.). The one or more post-transcriptional modifications can be any post-transcriptional modification, such as any of the more than one hundred different nucleoside modifications that have been identified in RNA (Rozenski, J, Crain, P, and McCloskey, J. (1999). The RNA Modification Database: 1999 update. Nucl Acids Res 27: 196-197). In some embodiments, the first isolated nucleic acid includes messenger RNA (mRNA). In some embodiments, the polyribonucleotide includes at least one nucleoside selected from the group such as those described in [0311] of International Patent Publication No. WO2019/118919A1, which is incorporated herein by reference in its entirety.

[0281] A polyribonucleotide may include any useful modification, such as to the sugar, the nucleobase, or the internucleoside linkage (e.g., to a linking phosphate/to a phosphodiester linkage/to the phosphodiester backbone). One or more atoms of a pyrimidine nucleobase may be replaced or substituted with optionally substituted amino, optionally substituted thiol, optionally substituted alkyl (e.g., methyl or ethyl), or halo (e.g., chloro or fluoro). In certain embodiments, modifications (e.g., one or more modifications) are present in each of the sugar and the internucleoside linkage. Modifications may be modifications of ribonucleic acids (RNAs) to deoxyribonucleic acids (DNAs), threose nucleic acids (TNAs), glycol nucleic acids (GNAs), peptide nucleic acids (PNAs), locked nucleic acids (LNAs) or hybrids thereof). Additional modifications are described herein.

[0282] In some embodiments, a polyribonucleotide includes at least one N(6)methyladenosine (m6A) modification to increase translation efficiency. In some embodiments, the m6A modification can reduce immunogenicity (e.g., reduce the level of one or more marker of an immune or inflammatory response) of the polyribonucleotide.

[0283] In some embodiments, a modification may include a chemical or cellular induced modification. For example, some non-limiting examples of intracellular RNA modifications are described by Lewis and Pan in “RNA modifications and structures cooperate to guide RNA-protein interactions” from Nat Reviews Mol Cell Biol, 2017, 18:202-210.

[0284] In some embodiments, chemical modifications to the ribonucleotides of a polyribonucleotide may enhance immune evasion. The polyribonucleotide may be synthesized and/or modified by methods well established in the art, such as those described in CURRENT PROTOCOLS IN NUCLEIC ACID CHEMISTRY, Beaucage, S. L. et al. (Eds.), John Wiley & Sons, Inc., New York, NY, USA, which is hereby incorporated herein by reference. Modifications include, for example, end modifications, e.g., 5′ end modifications (phosphorylation (mono-, di- and tri-), conjugation, inverted linkages, etc.), 3′ end modifications (conjugation, DNA nucleotides, inverted linkages, etc.), base modifications (e.g., replacement with stabilizing bases, destabilizing bases, or bases that base pair with an expanded repertoire of partners), removal of bases (abasic nucleotides), or conjugated bases. The modified ribonucleotide bases may also include 5-methylcytidine and pseudouridine. In some embodiments, base modifications may modulate expression, immune response, stability, subcellular localization, to name a few functional effects, of the polyribonucleotide. In some embodiments, the modification includes a bi-orthogonal nucleotide, e.g., an unnatural base. See for example, Kimoto et al, Chem Commun (Camb), 2017, 53:12309, DOI: 10.1039/c7cc06661a, which is hereby incorporated by reference.

[0285] In some embodiments, sugar modifications (e.g., at the 2′ position or 4′ position) or replacement of the sugar one or more ribonucleotides of the polyribonucleotide may, as well as backbone modifications, include modification or replacement of the phosphodiester linkages. Specific examples of polyribonucleotide include, but are not limited to, polyribonucleotide including modified backbones or no natural internucleoside linkages such as internucleoside modifications, including modification or replacement of the phosphodiester linkages. Polyribonucleotides having modified backbones include, among others, those that do not have a phosphorus atom in the backbone. For the purposes of this application, and as sometimes referenced in the art, modified RNAs that do not have a phosphorus atom in their internucleoside backbone can also be considered to be oligonucleosides. In particular embodiments, the polyribonucleotide will include ribonucleotides with a phosphorus atom in its internucleoside backbone.

[0286] Modified polyribonucleotide backbones may include, for example, phosphorothioates, chiral phosphorothioates, phosphorodithioates, phosphotriesters, aminoalkylphosphotriesters, methyl and other alkyl phosphonates such as 3′-alkylene phosphonates and chiral phosphonates, phosphinates, phosphoramidates such as 3′-amino phosphoramidate and aminoalkylphosphoramidates, thionophosphoramidates, thionoalkylphosphonates, thionoalkylphosphotriesters, and boranophosphates having normal 3′-5′ linkages, 2′-5′ linked analogs of these, and those having inverted polarity wherein the adjacent pairs of nucleoside units are linked 3′-5′ to 5′-3′ or 2′-5′ to 5′-2′. Various salts, mixed salts and free acid forms are also included. In some embodiments, the polyribonucleotide may be negatively or positively charged.

[0287] The modified nucleotides, which may be incorporated into the polyribonucleotide, can be modified at the internucleoside linkage (e.g., phosphate backbone). Herein, in the context of the polynucleotide backbone, the phrases “phosphate” and “phosphodiester” are used interchangeably. Backbone phosphate groups can be modified by replacing one or more of the oxygen atoms with a different substituent. Further, the modified nucleosides and nucleotides can include the wholesale replacement of an unmodified phosphate moiety with another internucleoside linkage as described herein. Examples of modified phosphate groups include, but are not limited to, phosphorothioate, phosphoroselenates, boranophosphates, boranophosphate esters, hydrogen phosphonates, phosphoramidates, phosphorodiamidates, alkyl or aryl phosphonates, and phosphotriesters. Phosphorodithioates have both non-linking oxygens replaced by sulfur. The phosphate linker can also be modified by the replacement of a linking oxygen with nitrogen (bridged phosphoramidates), sulfur (bridged phosphorothioates), and carbon (bridged methylenephosphonates).

[0288] The a-thio substituted phosphate moiety is provided to confer stability to RNA and DNA polymers through the unnatural phosphorothioate backbone linkages. Phosphorothioate DNA and RNA have increased nuclease resistance and subsequently a longer half-life in a cellular environment. Phosphorothioate linked to the polyribonucleotide is expected to reduce the innate immune response through weaker binding/activation of cellular innate immune molecules.

[0289] In specific embodiments, a modified nucleoside includes an alpha-thio-nucleoside (e.g., 5′-O—(I-thiophosphate)-adenosine, 5′-O—(I-thiophosphate)-cytidine (a-thio-cytidine), 5′-O—(I-thiophosphate)-guanosine, 5′-O—(I-thiophosphate)-uridine, or 5′-O-(1-thiophosphate)-pseudouridine).

[0290] Other internucleoside linkages that may be employed according to the present disclosure, including internucleoside linkages which do not contain a phosphorous atom, are described herein.

[0291] In some embodiments, a polyribonucleotide may include one or more cytotoxic nucleosides. For example, cytotoxic nucleosides may be incorporated into polyribonucleotide, such as bifunctional modification. Cytotoxic nucleoside may include, but are not limited to, adenosine arabinoside, 5-azacytidine, 4′-thio-aracytidine, cyclopentenylcytosine, cladribine, clofarabine, cytarabine, cytosine arabinoside, I-(2-C-cyano-2-deoxy-beta-D-arabino-pentofuranosyl)-cytosine, decitabine, 5-fluorouracil, fludarabine, floxuridine, gemcitabine, a combination of tegafur and uracil, tegafur ((RS)-5-fluoro-I-(tetrahydrofuran-2-yl)pyrimidine-2,4(IH,3H)-dione), troxacitabine, tezacitabine, 2′-deoxy-2′-methylidenecytidine (DMDC), and 6-mercaptopurine. Additional examples include fludarabine phosphate, N4-behenoyl-I-beta-D-arabinofuranosylcytosine, N4-octadecyl-1-beta-D-arabinofuranosylcytosine, N4-palmitoyl-I-(2-C-cyano-2-deoxy-beta-D-arabino-pentofuranosyl) cytosine, and P-4055 (cytarabine 5′-elaidic acid ester).

[0292] A polyribonucleotide may or may not be uniformly modified along the entire length of the molecule. For example, one or more or all types of nucleotides (e.g., naturally occurring nucleotides, purine or pyrimidine, or any one or more or all of A, G, U, C, 1, pU) may or may not be uniformly modified in the polyribonucleotide, or in a given predetermined sequence region thereof. In some embodiments, the polyribonucleotide includes a pseudouridine. In some embodiments, the polyribonucleotide includes an inosine, which may aid in the immune system characterizing the polyribonucleotide as endogenous versus viral RNAs. The incorporation of inosine may also mediate improved RNA stability/reduced degradation. See for example, Yu, Z. et al. (2015) RNA editing by ADAR1 marks dsRNA as “self”. Cell Res. 25, 1283-1284, which is incorporated by reference in its entirety.

[0293] In some embodiments, all nucleotides in a polyribonucleotide (or in a given sequence region thereof) are modified. In some embodiments, the modification may include an m6A, which may augment expression; an inosine, which may attenuate an immune response; pseudouridine, which may increase RNA stability, or translational readthrough (stagger element), an m5C, which may increase stability; and a 2,2,7-trimethylguanosine, which aids subcellular translocation (e.g., nuclear localization).

[0294] Different sugar modifications, nucleotide modifications, and/or internucleoside linkages (e.g., backbone structures) may exist at various positions in a polyribonucleotide. One of ordinary skill in the art will appreciate that the nucleotide analogs or other modification(s) may be located at any position(s) of the polyribonucleotide, such that the function of the polyribonucleotide is not substantially decreased. A modification may also be a non-coding region modification. The polyribonucleotide may include from about 1% to about 100% modified nucleotides (either in relation to overall nucleotide content, or in relation to one or more types of nucleotide, i.e. any one or more of A, G, U or C) or any intervening percentage (e.g., from 1% to 20%>, from 1% to 25%, from 1% to 50%, from 1% to 60%, from 1% to 70%, from 1% to 80%, from 1% to 90%, from 1% to 95%, from 10% to 20%, from 10% to 25%, from 10% to 50%, from 10% to 60%, from 10% to 70%, from 10% to 80%, from 10% to 90%, from 10% to 95%, from 10% to 100%, from 20% to 25%, from 20% to 50%, from 20% to 60%, from 20% to 70%, from 20% to 80%, from 20% to 90%, from 20% to 95%, from 20% to 100%, from 50% to 60%, from 50% to 70%, from 50% to 80%, from 50% to 90%, from 50% to 95%, from 50% to 100%, from 70% to 80%, from 70% to 90%, from 70% to 95%, from 70% to 100%, from 80% to 90%, from 80% to 95%, from 80% to 100%, from 90% to 95%, from 90% to 100%, and from 95% to 100%).

### Multimerization

[0295] In certain embodiments, the circular polyribonucleotide may include a multimerization domain. For example, a circular polyribonucleotide may encode a first polypeptide that is an immunogen (e.g., a coronavirus immunogen) and a second polypeptide that is a multimerization domain. For example, a multimerization domain may be encoded in the same open reading frame as an immunogen (e.g., a coronavirus immunogen) and expressed as fusion protein with the immunogen. In some embodiments, the circular polyribonucleotide may encode two or more immunogens, and each immunogen may optionally be fused to a multimerization domain. The multimerization domain may promote the formation of immunogen complexes (e.g., a complex including a plurality of immunogens).

[0296] Multimerization of the encoded immunogen may be beneficial for the induction of an immune response. Fusion of the immunogen to one or more multimerization elements (e.g., dimerization elements, trimerization elements, tetramerization elements, and oligomerization elements) may lead to the formation of a multimeric immunogen complex (e.g., formation of a multimeric immunogen complex following expression in an immunized subject). In some embodiments, formation of a multimeric immunogen complex increases immunogenicity of the immunogen. For example, formation of a multimeric immunogen complex may increase immunogenicity of the immunogen by mimicking an infection with an exogenous pathogen (e.g., a virus) where a plurality of potential immunogens is commonly located at the envelope of the pathogen (e.g., hemagglutinin (HA) immunogen of the influenza virus). In some embodiments, the multimerization complex includes at least 2, 3, 4, 6, 8, 10, 15, 20, 25, 30, 35, 40, 45, 50, 55, 60, 70, 80, 90, or 100 immunogens. In some embodiments, the immunogen complex includes 2 to 10, 2 to 50, 2 to 100, 5 to 10, 5 to 15, 5 to 20, 5 to 50, 5 to 100, 10 to 20, 10 to 30, 10 to 40, 10 to 50, 10 to 60, 10 to 100, 20 to 50 or 20 to 100 immunogens. In some embodiments, the immunogen complex comprises 6 copies of the immunogen (e.g., the circular polyribonucleotide encodes an immunogen-foldon-immunogen fusion protein). In some embodiments, the immunogen complex comprises 24 copies of the immunogen (e.g., the circular polyribonucleotide encodes an immunogen-ferritin fusion protein). In some embodiments, the immunogen complex comprises 60 copies of the immunogen (e.g., the circular polyribonucleotide encodes an immunogen-AaLS fusion protein or encodes immunogen-β-annulus peptide).

[0297] When used in combination with a polypeptide immunogen of interest in the context of the present disclosure, such multimerization elements can be placed N-terminal or C-terminal to the polypeptide of interest. On nucleic acid level, the coding sequence for such multimerization element is typically placed in the same reading frame, 5′ or 3′ to the coding sequence for the polypeptide or protein of interest.

[0298] The multimerization domain may have between 10 and 500 amino acid residues (e.g., between 10 and 450, 10 and 400, 10 and 350, 10 and 300, 10 and 250, 10 and 200, 10 and 150, 10 and 100, 10 and 50, 50 and 500, 100 and 500, 150 and 500, 200 and 500, 250 and 500, 300 and 500, 350 and 500, 400 and 500, and 450 and 500 residues). In some embodiments, the multimerization domain may include between 20 and 2500 amino acid residues (e.g., between 20 and 250, 20 and 225, 20 and 200, 20 and 175, 20 and 150, 20 and 150, 20 and 125, 20 and 100, 20 and 75, 20 and 50, 50 and 250, 75 and 250, 100 and 250, 125 and 250, 150 and 250, 175 and 250, 200 and 250, and 225 and 250 residues).

[0299] In some embodiments, an immunogen fused to the multimerization domain is at least 2-fold, 5-fold, or 10-fold more immunogenic than the immunogen (e.g., in a human subject). In some embodiments, the immunogen fused to a multimerization domain is at least 20%, 30%, 40%, 50%, 60%, 70%, 80%, 90%, 100%, 200%, 300%, 400%, or 500% more immunogenic (e.g., in a human subject) than the immunogen not fused to a multimerization domain.

[0300] Particular multimerization elements are oligomerization elements, tetramerization elements, trimerization elements or dimerization elements. Dimerization elements may be selected from e.g., dimerization elements/domains of heat shock proteins, immunoglobulin Fc domains and leucine zippers (dimerization domains of the basic region leucine zipper class of transcription factors). Trimerization and tetramerization elements may be selected from e.g., engineered leucine zippers (engineered a-helical coiled coil peptide that adopt a parallel trimeric state), fibritin foldon domain from enterobacteria phage T4, GCN4pll, CCN4-pLI, and p53. In some embodiments, the circular polyribonucleotide includes a T4 foldon domain. In particular embodiments, the T4 foldon domain has an amino acid sequence that is at least 95% identical to GYIPEAPRDGQAYVRKDGEWVLLSTFL (SEQ ID NO: 204). In some embodiments, the T4 foldon has an amino acid sequence of SEQ ID NO: 204. In some embodiments, the multimerization domain is a β-annulus peptide (see, Matsuura et al. (2010), ANGEW. CHEM. INT. ED., 49: 9662-65). In some embodiments, the β-annulus peptide has an amino acid sequence of INHVGGTGGAIMAPVAVTRQLVGS (SEQ ID NO: 205), where the C-terminal Serine residue is optionally present or absent or has an amino acid sequence that is at least 95% identical to SEQ ID NO: 205. In some embodiments, the circular polyribonucleotide includes an AaLS peptide. In particular embodiments, the AaLS peptide has an amino acid sequence that is at least 95% identical to TDILGKYVINYLNKLKKKEDIFKEFLKW (SEQ ID NO: 282). In some embodiments, the AaLS peptide has an amino acid sequence of SEQ ID NO: 282.

[0301] Oligomerization elements may be selected from e.g., ferritin, surfactant D, oligomerization domains of phosphoproteins of paramyxoviruses, complement inhibitor C4 binding protein (C4 bp) oligomerization domains, Viral infectivity factor (Vif) oligomerization domain, sterile alpha motif (SAM) domain, and von Willebrand factor type D domain.

[0302] Ferritin forms oligomers and is a highly conserved protein found in all animals, bacteria, and plants. Ferritin is a protein that spontaneously forms nanoparticles of 24 identical subunits. Ferritin-immunogen fusion constructs potentially form oligomeric aggregates or “clusters” of immunogens that may enhance the immune response. In some embodiments, the circular polyribonucleotide includes a ferritin domain. In some embodiments, the circular polyribonucleotide includes a ferritin domain having the amino acid sequence of:
[0303] DIIKLLNEQVNKEMNSSNLYMSMSSWCYTHSLDGAGLFLFDHAAEEYEHAKKLIVFLNEN NVPVQLTSISAPEHKFESLTQIFQKAYEHEQHISESINNIVDHAIKGKDHATFNFLQWYVS EQHEEEVLFKDILDKIELIGNENHGLYLADQYVKGIAKSRKS (SEQ ID NO: 207).

[0304] Surfactant D protein (SPD) is a hydrophilic glycoprotein that spontaneously self-assembles to form oligomers. An SPD-immunogen fusion constructs may form oligomeric aggregates or “clusters” of immunogens that may enhance the immune response.

[0305] Phosphoprotein of paramyxoviruses (negative sense RNA viruses) functions as a transcriptional transactivator of the viral polymerase. Oligomerization of the phosphoprotein is critical for viral genome replication. A phosphoprotein-immunogen fusion constructs may form oligomeric aggregates or “clusters” of immunogens that may enhance the immune response.

[0306] Complement inhibitor C4 binding Protein (C4 bp) may also be used as a fusion partner to generate oligomeric immunogen aggregates. The C-terminal domain of C4 bp (57 amino acid residues in humans and 54 amino acid residues in mice) is both necessary and sufficient for the oligomerization of C4 bp or other polypeptides fused to it. A C4 bp-immunogen fusion constructs may form oligomeric aggregates or “clusters” of immunogens that may enhance the immune response. Viral infectivity factor (Vif) multimerization domain has been shown to form oligomers both in vitro and in vivo. The oligomerization of Vif involves a sequence mapping between residues 1 51 to 1 64 in the C-terminal domain, the 1 61 PPLP1 64 motif (for human HIV-1: TPKKIKPPLP (SEQ ID NO: 327). A Vif-immunogen fusion constructs may form oligomeric aggregates or “clusters” of immunogens that may enhance the immune response.

[0307] The sterile alpha motif (SAM) domain is a protein interaction module present in a wide variety of proteins involved in many biological processes. The SAM domain that spreads over around 70 residues is found in diverse eukaryotic organisms. SAM domains have been shown to homo- and hetero-oligomerise, forming multiple self-association oligomeric architectures. A SAM-immunogen fusion constructs may form oligomeric aggregates or “clusters” of immunogens that may enhance the immune response. von Willebrand factor (vWF) contains several type D domains: D1 and D2 are present within the N-terminal propeptide whereas the remaining D domains are required for oligomerization. The vWF domain is found in various plasma proteins: complement factors B, C2, C 3 and CR4; the Integrins (I-domains); collagen types VI, VII, XII and XIV; and other extracellular proteins. A vWF-immunogen fusion constructs may form oligomeric aggregates or “clusters” of immunogens that may enhance the immune response.

[0308] In some embodiments, the circular polyribonucleotide may include one or more multimerization domains. For example, the circular polyribonucleotide may include 2, 3, 4, 5, 6, 7, 8, 9, or 10 multimerization domains. In some embodiments, the circular polyribonucleotide includes two multimerization domains. Two or more multimerization domains may be adjacent to one another. Alternatively, two or more multimerization domains may be separated by one or more other elements. For example, two multimerization domains may be separated by an immunogen. In particular embodiments, the circular polyribonucleotide includes a ferritin domain and a T4 foldon domain. The ferritin and T4 foldon domain may be linked by a Gly-Ser linker. In some embodiments, the ferritin domain linked to the T4 foldon domain has an amino acid sequence of:

(SEQ ID NO: 206)
PGSGYIPEAPRDGQAYVRKDGEWVLLSTFLSGRSGGDIIKLLNEQVNKE
MNSSNLYMSMSSWCYTHSLDGAGLFLFDHAAEEYEHAKKLIVFLNENNV
PVQLTSISAPEHKFESLTQIFQKAYEHEQHISESINNIVDHAIKGKDHA
TFNFLQWYVSEQHEEEVLFKDILDKIELIGNENHGLYLADQYVKGIAKS
RKS.

[0309] In some embodiments, the multimerization domain is a lumazine synthase domain. Lumazine synthase may assemble into a complex including 60 copies of the lumazine synthase domain, where each lumazine synthase domain may be fused to one or more immunogens. In some embodiments, the lumazine synthase domain includes an amino acid sequence of any of SEQ ID NOs: 208-209, 325, and 328-329 or an amino acid sequence having a least 95% sequence identity with any one of SEQ ID NOs: 208-209, 325, and 328-329.

SEQ ID NO: 328
MQIYEGKLTAEGLRFGIVASRFNHALVDRLVEGAIDAIVRHGGREEDIT
LVRVPGSWEIPVAAGELARKEDIDAVIAIGVLIRGATPHFDYIASEVSK
GLADLSLELRKPITFGVITADTLEQAIERAGTKHGNKGWEAALSAIEMA
NLFKSLR
SEQ ID NO: 329
QIYEGKLTAEGLRFGIVASRFNHALVDRLVEGCIDCIVRHGGREEDITL
VRVPGSWEIPVAAGELARKEDIDAVIAIGVLIRGATPHFDYIASEVSKG
LANLSLELRKPITFGVITADTLEQAIERAGTKHGNKCWEAALSAIEMAN
LFKSLR
SEQ ID NO: 208
QIYEGKLTAEGLRFGIVASRFNHALVDRLVEGAIDAIVRHGGREEDITL
VRVPGSWEIPVAAGELARKENISAVIAIGVLIRGATPHFDYIASEVSKG
LADLSLELRKPITFGVITADTLEQAIERAGTKHGNKGWEAALSAIEMAN
LFKSLR
SEQ ID NO: 209
QIYEGKLTAEGLRFGIVASRFNHALVDRLVEGAIDCIVRHGGREEDITL
VRVPGSWEIPVAAGELARKEDIDAVIAIGVLIRGATPHFDYIASEVSKG
LADLSLELRKPITFGVITADTLEQAIERAGTKHGNKGWEAALSAIEMAN
LFKSLR
SEQ ID NO: 325
MQIYEGKLTAEGLRFGIVASRFNHALVDRLVEGAIDCIVRHGGREEDIT
LVRVPGSWEIPVAAGELARKEDIDAVIAIGVLIRGATPHFDYIASEVSK
GLANLSLELRKPITFGVITADTLEQAIERAGTKHGNKGWEAALSAIEMA
NLFKSLR

[0310] Lumazine synthase domains are provided with one or more cysteine substitutions to introduce non-native disulfide bond(s) that stabilize the lumazine synthase complex formed from self-assembled subunits. In some embodiments, the non-native disulfide bond(s) are introduced with L121C-K131C, L121CG-K131C, L121GC-K131C, K7C-R40C, 13C-L50C, 182C-K131CG, E5C-R52C, or E95C-A101C substitutions, or a combination thereof (such as 13C-L50C and 182C-K131CG; E5C-R52C and 182C-K131CG; or E95C-A101C and 182C-K131CG). The residues numbering is with reference to the lumazine synthase subunit set forth as SEQ ID NO: 328. Non-limiting examples include:

(L121C-K131C)
SEQ ID NO: 210
QIYEGKLTAEGLRFGIVASRFNHALVDRLVEGAIDAIVRHGGREEDITL
VRVPGSWEIPVAAGELARKENISAVIAIGVLIRGATPHFDYIASEVSKG
LADLSLELRKPITFGVITADTCEQAIERAGTcHGNKGWEAALSAIEMAN
LFKSLR
(L121CG-K131C)
SEQ ID NO: 211
QIYEGKLTAEGLRFGIVASRFNHALVDRLVEGAIDAIVRHGGREEDITL
VRVPGSWEIPVAAGELARKENISAVIAIGVLIRGATPHFDYIASEVSKG
LADLSLELRKPITFGVITADTcCfEQAIERAGTcHGNKGWEAALSAIEM
ANLFKSLR
(L121GC-K131C)
SEQ ID NO: 212
QIYEGKLTAEGLRFGIVASRFNHALVDRLVEGAIDAIVRHGGREEDITL
VRVPGSWEIPVAAGELARKENISAVIAIGVLIRGATPHFDYIASEVSKG
LADLSLELRKPITFGVITADTCfcEQAIERAGTcHGNKGWEAALSAIEM
ANLFKSLR
(K7C-R40C)
SEQ ID NO: 213
QIYEGCLTAEGLRFGIVASRFNHALVDRLVEGAIDAIVCHGGREEDITL
VRVPGSWEIPVAAGELARKENISAVIAIGVLIRGATPHFDYIASEVSKG
LADLSLELRKPITFGVITADTLEQAIERAGTKHGNKGWEAALSAIEMAN
LFKSLR
(I3C-L50C, I82C-K131CG)
SEQ ID NO: 214
QCYEGKLTAEGLRFGIVASRFNHALVDRLVEGAIDCIVRHGGREEDITC
VRVPGSWEIPVAAGELARKEDIDAVIAIGVLCRGATPHFDYIASEVSKG
LADLSLELRKPITFGVITADTLEQAIERAGTCGHGNKGWEAALSAIEMA
NLFKSLR
(E5C-R52C, I82C-K131CG)
SEQ ID NO: 215
QIYCGKLTAEGLRFGIVASRFNHALVDRLVEGAIDCIVRHGGREEDITL
VCVPGSWEIPVAAGELARKEDIDAVIAIGVLCRGATPHFDYIASEVSKG
LADLSLELRKPITFGVITADTLEQAIERAGTCGHGNKGWEAALSAIEMA
NLFKSLR
(E95C-A101C, I82C-K131CG)
SEQ ID NO: 216
QIYEGKLTAEGLRFGIVASRFNHALVDRLVEGAIDCIVRHGGREEDITL
VRVPGSWEIPVAAGELARKEDIDAVIAIGVLCRGATPHFDYIASCVSKG
LCDLSLELRKPITFGVITADTLEQAIERAGTCGHGNKGWEAALSAIEMA
NLFKSLR

[0311] Various methods of multimerization of polypeptides are described International Publication No. WO2020/061564, page 25, line 1 through page 26 line 20 which is herein incorporated by reference.

[0312] In some embodiments, the multimerization domain is a riboflavin synthase domain. For example, the riboflavin synthase domain may have an amino acid sequence having a least 95% sequence identity TDILGKYVINYLNKLKKKEDIFKEFLKW (SEQ ID NO: 326). In some embodiments, the riboflavin synthase domain may have an amino acid sequence of SEQ ID NO: 326.

[0313] Suitable multimerization domains may be selected, for example, from the list of amino acid sequences according to SEQ ID NOs: 1116-1167 of the international patent application WO2017/081082, or fragments or variants of these sequences.

### Production Methods

[0314] The disclosure provides methods for producing circular polyribonucleotides, including, e.g., recombinant technology or chemical synthesis. For example, a DNA molecule used to produce an RNA circle can include a DNA sequence of a naturally occurring nucleic acid sequence, a modified version thereof, or a DNA sequence encoding a synthetic polypeptide not normally found in nature (e.g., chimeric molecules or fusion proteins). DNA and RNA molecules can be modified using a variety of techniques including, but not limited to, classic mutagenesis techniques and recombinant techniques, such as site-directed mutagenesis, chemical treatment of a nucleic acid molecule to induce mutations, restriction enzyme cleavage of a nucleic acid fragment, ligation of nucleic acid fragments, polymerase chain reaction (PCR) amplification or mutagenesis of selected regions of a nucleic acid sequence, synthesis of oligonucleotide mixtures and ligation of mixture groups to “build” a mixture of nucleic acid molecules and combinations thereof.

[0315] The circular polyribonucleotides may be prepared according to any available technique, including, but not limited to chemical synthesis and enzymatic synthesis. In some embodiments, a linear primary construct or linear RNA may be cyclized or concatenated to create a circRNA described herein. The mechanism of cyclization or concatenation may occur through methods such as, e.g., chemical, enzymatic, splint ligation, or ribozyme-catalyzed methods. The newly formed 5′-3′ linkage may be an intramolecular linkage or an intermolecular linkage. For example, a splint ligase, such as a SplintR® ligase, can be used for splint ligation. According to this method, a single stranded polynucleotide (splint), such as a single-stranded DNA or RNA, can be designed to hybridize with both termini of a linear polyribonucleotide, so that the two termini can be juxtaposed upon hybridization with the single-stranded splint. Splint ligase can thus catalyze the ligation of the juxtaposed two termini of the linear polyribonucleotide, generating a circRNA. In some embodiments, a DNA or RNA ligase may be used in the synthesis of the circular polynucleotides. As a non-limiting example, the ligase may be a circ ligase or circular ligase.

[0316] In another example, either the 5′ or 3′ end of the linear polyribonucleotide can encode a ligase ribozyme sequence such that during in vitro transcription, the resultant linear circRNA includes an active ribozyme sequence capable of ligating the 5′ end of the linear polyribonucleotide to the 3′ end of the linear polyribonucleotide. The ligase ribozyme may be derived from the Group I Intron, Hepatitis Delta Virus, Hairpin ribozyme or may be selected by SELEX (systematic evolution of ligands by exponential enrichment).

[0317] In another example, a linear polyribonucleotide may be cyclized or concatenated by using at least one non-nucleic acid moiety. For example, the at least one non-nucleic acid moiety may react with regions or features near the 5′ terminus or near the 3′ terminus of the linear polyribonucleotide in order to cyclize or concatenate the linear polyribonucleotide. In another example, the at least one non-nucleic acid moiety may be located in or linked to or near the 5′ terminus or the 3′ terminus of the linear polyribonucleotide. The non-nucleic acid moieties may be homologous or heterologous. As a non-limiting example, the non-nucleic acid moiety may be a linkage such as a hydrophobic linkage, ionic linkage, a biodegradable linkage, or a cleavable linkage. As another non-limiting example, the non-nucleic acid moiety is a ligation moiety. As yet another non-limiting example, the non-nucleic acid moiety may be an oligonucleotide or a peptide moiety, such as an aptamer or a non-nucleic acid linker as described herein.

[0318] In another example, linear polyribonucleotides may be cyclized or concatenated by self-splicing. In some embodiments, the linear polyribonucleotides may include loop E sequence to self-ligate. In another embodiment, the linear polyribonucleotides may include a self-circularizing intron, e.g., a 5′ and 3′ slice junction, or a self-circularizing catalytic intron such as a Group I, Group II, or Group III Introns. Nonlimiting examples of group I intron self-splicing sequences may include self-splicing permuted intron-exon sequences derived from T4 bacteriophage gene td, and the intervening sequence (IVS) rRNA of Tetrahymena, cyanobacterium Anabaena pre-tRNA-Leu gene, or a Tetrahymena pre-rRNA.

[0319] In some embodiments, the polyribonucleotide may include catalytic intron fragments, such as a 3′ half of Group I catalytic intron fragment and a 5′ half of Group I catalytic intron fragment. The first and second annealing regions may be positioned within the catalytic intron fragments. Group I catalytic introns are self-splicing ribozymes that catalyze their own excision from mRNA, tRNA, and rRNA precursors via two-metal ion phorphoryl transfer mechanism. Importantly, the RNA itself self-catalyzes the intron removal without the requirement of an exogenous enzyme, such as a ligase.

[0320] In some embodiments, the 3′ half of Group I catalytic intron fragment and the 5′ half of Group I catalytic intron fragment are from a cyanobacterium Anabaena pre-tRNA-Leu gene, or a Tetrahymena pre-rRNA.

[0321] In some embodiments, the 3′ half of Group I catalytic intron fragment and the 5′ half of Group I catalytic intron fragment are from a Cyanobacterium Anabaena pre-tRNA-Leu gene, and the 3′ exon fragment includes the first annealing region and the 5′ exon fragment includes the second annealing region. The first annealing region may include, e.g., from 5 to 50, e.g., from 10 to 15 (e.g., 10, 11, 12, 13, 14, or 15) ribonucleotides and the second annealing region may include, e.g., from 5 to 50, e.g., from 10 to 15 (e.g., 10, 11, 12, 13, 14, or 15) ribonucleotides.

[0322] In some embodiments, the 3′ half of Group I catalytic intron fragment and the 5′ half of Group I catalytic intron fragment are from a Tetrahymena pre-rRNA, and the 3′ half of Group I catalytic intron fragment includes the first annealing region and the 5′ exon fragment includes the second annealing region. In some embodiments, the 3′ exon includes the first annealing region and the 5′ half of Group I catalytic intron fragment includes the second annealing region. The first annealing region may include, e.g., from 6 to 50, e.g., from 10 to 16 (e.g., 10, 11, 12, 13, 14, 15, or 16) ribonucleotides, and the second annealing region may include, e.g., from 6 to 50, e.g., from 10 to 16 (e.g., 10, 11, 12, 13, 14, 15, or 16) ribonucleotides.

[0323] In some embodiments, the 3′ half of Group I catalytic intron fragment and the 5′ half of Group I catalytic intron fragment are from a cyanobacterium Anabaena pre-tRNA-Leu gene, a Tetrahymena pre-rRNA, or a T4 phage td gene.

[0324] In some embodiments, the 3′ half of Group I catalytic intron fragment and the 5′ Group I catalytic intron fragment are from a T4 phage td gene. The 3′ exon fragment may include the first annealing region and the 5′ half of Group I catalytic intron fragment may include the second annealing region. The first annealing region may include, e.g., from 2 to 16, e.g., 10 to 16 (e.g., 2, 3, 4, 5, 6, 7, 8, 9, 10, 11, 12, 13, 14, 15, or 16) ribonucleotides, and the second annealing region may include, e.g., from 2 to 16, e.g., 10 to 16 (e.g., 2, 3, 4, 5, 6, 7, 8, 9, 10, 11, 12, 13, 14, 15, or 16) ribonucleotides.

[0325] In some embodiments, the 3′ half of Group I catalytic intron fragment is the 5′ terminus of the linear polynucleotide.

[0326] In some embodiments, the 5′ half of Group I catalytic intron fragment is the 3′ terminus of the linear polyribonucleotide.

[0327] In some embodiments, the 3′ half of Group I catalytic intron fragment has at least 80% (e.g., at least 85%, 90%, 95%, 97%, 99%, or 100%) sequence identity to the sequence of 5′-AACAACAGATAACTTACAGCTAGTCGGAAGGTGCAGAGACTCGACGGGAGCTACCCTAACGTCAAG ACGAGGGTAAAGAGAGAGTCCAATTCTCAAAGCCAATAGGCAGTAGCGAAAGCTGCGGGAGAATG-3′ (SEQ ID NO: 307).

[0328] In some embodiments, the 5′ half of Group I catalytic intron fragment has at least 80% (e.g., at least 85%, 90%, 95%, 97%, 99%, or 100%) sequence identity to the sequence of 5′-AAATAATTGAGCCTTAGAGAAGAAATTCTTTAAGTGGATGCTCTCAAACTCAGGGAAACCTAAATCTA GCTATAGACAAGGCAATCCTGAGCCAAGCCGAAGTAGTAATTAGTAAGTT-3′ (SEQ ID NO: 308).

[0329] In some embodiments, the 3′ half of Group I catalytic intron fragment has the sequence of SEQ ID NO: 307 and the 5′ half of Group I catalytic intron fragment has the sequence of SEQ ID NO: 308.

[0330] In some embodiments, the 3′ half of Group I catalytic intron fragment has at least 80% (e.g., at least 85%, 90%, 95%, 97%, 99%, or 100%) sequence identity to the sequence of 5′-CTTCTGTTGATATGGATGCAGTTCACAGACTAAATGTCGGTCGGGGAAGATGTATTCTTCTCATAAGA TATAGTCGGACCTCTCCTTAATGGGAGCTAGCGGATGAAGTGATGCAACACTGGAGCCGCTGGGAA CTAATTTGTATGCGAAAGTATATTGATTAGTTTTGGAGTACTCG-3′ (SEQ ID NO: 309).

[0331] In some embodiments, the 5′ half of Group I catalytic intron fragment has at least 80% (e.g., at least 85%, 90%, 95%, 97%, 99%, or 100%) sequence identity to the sequence of 5′-AAATAGCAATATTTACCTTTGGAGGGAAAAGTTATCAGGCATGCACCTGGTAGCTAGTCTTTAAACCA ATAGATTGCATCGGTTTAAAAGGCAAGACCGTCAAATTGCGGGAAAGGGGTCAACAGCCGTTCAGTA CCAAGTCTCAGGGGAAACTTTGAGATGGCCTTGCAAAGGGTATGGTAATAAGCTGACGGACATGGT CCTAACCACGCAGCCAAGTCCTAAGTCAACAGAT-3′ (SEQ ID NO: 310).

[0332] In some embodiments, the 3′ half of Group I catalytic intron fragment has the sequence of SEQ ID NO: 309 and the 5′ half of Group I catalytic intron fragment has the sequence of SEQ ID NO: 310.

[0333] In some embodiments, the 3′ half of Group I catalytic intron fragment has at least 80% (e.g., at least 85%, 90%, 95%, 97%, 99%, or 100%) sequence identity to the sequence of 5′-GGTTCTACATAAATGCCTAACGACTATCCCTTTGGGGAGTAGGGTCAAGTGACTCGAAACGATAGAC AACTTGCTTTAACAAGTTGGAGATATAGTCTGCTCTGCATGGTGACATGCAGCTGGATATAATTCCGG GGTAAGATTAACGACCTTATCTGAACATAATG-3′ (SEQ ID NO: 311).

[0334] In some embodiments, the 5′ half of Group I catalytic intron fragment has at least 80% (e.g., at least 85%, 90%, 95%, 97%, 99%, or 100%) sequence identity to the sequence of 5′-TAATTGAGGCCTGAGTATAAGGTGACTTATACTTGTAATCTATCTAAACGGGGAACCTCTCTAGTAGA CAATCCCGTGCTAAATTGTAGGACT-3′ (SEQ ID NO: 312).

[0335] In some embodiments, the 3′ half of Group I catalytic intron fragment has the sequence of SEQ ID NO: 311 and the 5′ half of Group I catalytic intron fragment has the sequence of SEQ ID NO: 312.

[0336] In some embodiments, the 3′ half of Group I catalytic intron fragment has at least 80% (e.g., at least 85%, 90%, 95%, 97%, 99%, or 100%) sequence identity to the sequence of 5′-TAAACAACTAACAGCTTTAGAAGGTGCAGAGACTAGACGGGAGCTACCCTAACGGATTCAGCCGAG GGTAAAGGGATAGTCCAATTCTCAACATCGCGATTGTTGATGGCAGCGAAAGTTGCAGAGAGAATGA AAATCCGCTGACTGTAAAGGTCGTGAGGGTTCGAGTCCCTCCGCCCCCA-3′ (SEQ ID NO: 313).

[0337] In some embodiments, the 5′ half of Group I catalytic intron fragment has at least 80% (e.g., at least 85%, 90%, 95%, 97%, 99%, or 100%) sequence identity to the sequence of 5′-ACGGTAGACGCAGCGGACTTAGAAAACTGGGCCTCGATCGCGAAAGGGATCGAGTGGCAGCTCTCA AACTCAGGGAAACCTAAAACTTTAAACATTMAAGTCATGGCAATCCTGAGCCAAGCTAAAGC-3′ (SEQ ID NO: 314).

[0338] In some embodiments, the 3′ half of Group I catalytic intron fragment has the sequence of SEQ ID NO: 313 and the 5′ half of Group I catalytic intron fragment has the sequence of SEQ ID NO: 314.

[0339] In some embodiments, the 3′ half of Group I catalytic intron fragment has at least 80% (e.g., at least 85%, 90%, 95%, 97%, 99%, or 100%) sequence identity to the sequence of 5′-TTAAACTCAAAATTTAAAATCCCAAATTCAAAATTCCGGGAAGGTGCAGAGACTCGACGGGAGCTAC CCTAACGTAAAGCCGAGGGTAAAGGGAGAGTCCAATTCTCAAAGCCTGAAGTTGCTGAAGCAACAA GGCAGTAGTGAAAGCTGCGAGAGAATGAAAATCCGTTGACTGTAAAAAGTCGTGGGGGTTCAAGTC CCCCCACCCCC-3′ (SEQ ID NO: 315).

[0340] In some embodiments, the 5′ half of Group I catalytic intron fragment has at least 80% (e.g., at least 85%, 90%, 95%, 97%, 99%, or 100%) sequence identity to the sequence of 5′-ATGGTAGACGCTACGGACTTAGAAAACTGAGCCTTGATAGAGAAATCTTTTAAGTGGAAGCTCTCAAA TTCAGGGAAACCTAAATCTGAATACAGATATGGCAATCCTGAGCCAAGCCCAGAAAATTTAGACTTGA GATTTGATTTTGGAG-3′ (SEQ ID NO: 316).

[0341] In some embodiments, the 3′ half of Group I catalytic intron fragment has the sequence of SEQ ID NO: 315 and the 5′ half of Group I catalytic intron fragment has the sequence of SEQ ID NO: 316.

[0342] In some embodiments, the 3′ half of Group I catalytic intron fragment has at least 80% (e.g., at least 85%, 90%, 95%, 97%, 99%, or 100%) sequence identity to the sequence of 5′-GGCTTTCAATTTGAAATCAGAAATTCAAAATTCAGGGAAGGTGCAGAGACTCGACGGGAGCTACCCT AACGTAAAGGCGAGGGTAAAGGGAGAGTCCAATTCTTAAAGCCTGAAGTTGTGCAAGCAACAAGGC AACAGTGAAAGCTGTGGAAGAATGAAAATCCGTTGACCTTAAACGGTCGTGGGGGTTCAAGTCCCCC CACCCCC-3′ (SEQ ID NO: 317).

[0343] In some embodiments, the 5′ half of Group I catalytic intron fragment has at least 80% (e.g., at least 85%, 90%, 95%, 97%, 99%, or 100%) sequence identity to the sequence of 5′-ATGGTAGACGCTACGGACTTAGAAAACTGAGCCTTGATAGAGAAATCTTTCAAGTGGAAGCTCTCAA ATTCAGGGAAACCTAAATCTGAATACAGATATGGCAATCCTGAGCCAAGCCCGGAAATTTTAGAATCA AGATTTTATTTT-3′ (SEQ ID NO: 318).

[0344] In some embodiments, the 3′ half of Group I catalytic intron fragment has the sequence of SEQ ID NO: 317 and the 5′ half of Group I catalytic intron fragment has the sequence of SEQ ID NO: 318.

[0345] In some embodiments, the 3′ half of Group I catalytic intron fragment has at least 80% (e.g., at least 85%, 90%, 95%, 97%, 99%, or 100%) sequence identity to the sequence of 5′-AGAAATGGAGAAGGTGTAGAGACTGGAAGGCAGGCACCCTAACGTTAAAGGCGAGGGTGAAGGGA CAGTCCAGACCACAAACCAGTAAATCTGGGCAGCGAAAGCTGTAGATGGTAAGCATAACCCGAAGG TCAGTGGTTCAAATCCACTTCCCGCCACCAAATTAAAAAAACAATAA-3′ (SEQ ID NO: 319).

[0346] In some embodiments, the 5′ half of Group I catalytic intron fragment has at least 80% (e.g., at least 85%, 90%, 95%, 97%, 99%, or 100%) sequence identity to the sequence of 5′-AGAAATGGAGAAGGTGTAGAGACTGGAAGGCAGGCACCCTAACGTTAAAGGCGAGGGTGAAGGGA CAGTCCAGACCACAAACCAGTAAATCTGGGCAGCGAAAGCTGTAGATGGTAAGCATAACCCGAAGG TCAGTGGTTCAAATCCACTTCCCGCCACCAAATTAAAAAAACAATAA-3′ (SEQ ID NO: 320).

[0347] In some embodiments, the 3′ half of Group I catalytic intron fragment has the sequence of SEQ ID NO: 319 and the 5′ half of Group I catalytic intron fragment has the sequence of SEQ ID NO: 320.

[0348] In some embodiments, the 3′ half of Group I catalytic intron fragment has at least 80% (e.g., at least 85%, 90%, 95%, 97%, 99%, or 100%) sequence identity to the sequence of 5′-ACAACAGATAACTTACTAACTTACAGCTAGTCGGAAGGTGCAGAGACTCGACGGGAGCTACCCTAAC GTCAAGACGAGGGTAAAGAGAGAGTCCAATTCTCAAAGCCAATAGGCAGTAGCGAAAGCTGCGGGA GAATGAAAATCCGTAGCGTCTAAACGGTCGTGTGGGTTCAAGTCCCTCCACCCCCA-3′ (SEQ ID NO: 321).

[0349] In some embodiments, the 5′ half of Group I catalytic intron fragment has at least 80% (e.g., at least 85%, 90%, 95%, 97%, 99%, or 100%) sequence identity to the sequence of 5′-AGACGCTACGGACTTAAATAATTGAGCCTTAGAGAAGAAATTCTTTAAGTGGATGCTCTCAAACTCAG GGAAACCTAAATCTAGCTATAGACAAGGCAATCCTGAGCCAAGCCGAAGTAGTAATTAGTAAGTTAG TAAGTT-3′ (SEQ ID NO: 322).

[0350] In some embodiments, the 3′ half of Group I catalytic intron fragment has the sequence of SEQ ID NO: 321 and the 5′ half of Group I catalytic intron fragment has the sequence of SEQ ID NO: 322.

[0351] In some embodiments, the 3′ half of Group I catalytic intron fragment has at least 80% (e.g., at least 85%, 90%, 95%, 97%, 99%, or 100%) sequence identity to the sequence of 5′-AACAACAGATAACTTACTAGTTACTAGTCGGAAGGTGCAGAGACTCGACGGGAGCTACCCTAACGTC AAGACGAGGGTAAAGAGAGAGTCCAATTCTCAAAGCCAATAGGCAGTAGCGAAAGCTGCGGGAGAA TGAAAATCCGTAGCGTCTAAACGGTCGTGTGGGTTCAAGTCCCTCCACCCCCA-3′ (SEQ ID NO: 323).

[0352] In some embodiments, the 5′ half of Group I catalytic intron fragment has at least 80% (e.g., at least 85%, 90%, 95%, 97%, 99%, or 100%) sequence identity to the sequence of 5′-AGACGCTACGGACTTAAATAATTGAGCCTTAGAGAAGAAATTCTTTAAGTGGATGCTCTCAAACTCAG GGAAACCTAAATCTAGCTATAGACAAGGCAATCCTGAGCCAAGCCGAAGTAGTAATTAGTAAGTT-3′ (SEQ ID NO: 324).

[0353] In some embodiments, the 3′ half of Group I catalytic intron fragment has the sequence of SEQ ID NO: 323 and the 5′ half of Group I catalytic intron fragment has the sequence of SEQ ID NO: 324.

[0354] In another example, a linear polyribonucleotide may be cyclized or concatenated by a non-nucleic acid moiety that causes an attraction between atoms, molecular surfaces at, near, or linked to the 5′ and 3′ ends of the linear polyribonucleotide. The one or more linear polyribonucleotides may be cyclized or concatenated by intermolecular forces or intramolecular forces. Non-limiting examples of intermolecular forces include dipole-dipole forces, dipole-induced dipole forces, induced dipole-induced dipole forces, Van der Waals forces, and London dispersion forces. Non-limiting examples of intramolecular forces include covalent bonds, metallic bonds, ionic bonds, resonant bonds, agnostic bonds, dipolar bonds, conjugation, hyperconjugation and antibonding.

[0355] In another example, the linear polyribonucleotide may comprise a ribozyme RNA sequence near the 5′ terminus and near the 3′ terminus. The ribozyme RNA sequence may covalently link to a peptide when the sequence is exposed to the remainder of the ribozyme. The peptides covalently linked to the ribozyme RNA sequence near the 5′ terminus and the 3′terminus may associate with each other, thereby causing a linear polyribonucleotide to cyclize or concatenate. In another example, the peptides covalently linked to the ribozyme RNA near the 5′ terminus and the 3′ terminus may cause the linear primary construct or linear mRNA to cyclize or concatenate after being subjected to ligated using various methods known in the art such as, but not limited to, protein ligation. Non-limiting examples of ribozymes for use in the linear primary constructs or linear polyribonucleotides of the present invention or a non-exhaustive listing of methods to incorporate or covalently link peptides are described in US patent application No. US20030082768, the contents of which is here in incorporated by reference in its entirety.

[0356] In yet another example, chemical methods of circularization may be used to generate the circular polyribonucleotide. Such methods may include but are not limited to click chemistry (e.g., alkyne and azide-based methods, or clickable bases), olefin metathesis, phosphoramidate ligation, hemiaminal-imine crosslinking, base modification, and any combination thereof.

[0357] In another example, the circular polyribonucleotide may be produced using a deoxyribonucleotide template transcribed in a cell-free system (e.g., by in vitro transcription) to a produce a linear RNA. The linear polyribonucleotide produces a splicing-compatible polyribonucleotide, which may be self-spliced to produce a circular polyribonucleotide.

[0358] In some embodiments, the disclosure provides a method of producing a circular polyribonucleotide (e.g., in a cell-free system) by providing a linear polyribonucleotide; and self-splicing linear polyribonucleotide under conditions suitable for splicing of the 3′ and 5′ splice sites of the linear polyribonucleotide; thereby producing a circular polyribonucleotide.

[0359] In some embodiments, the disclosure provides a method of producing a circular polyribonucleotide by providing a deoxyribonucleotide encoding the linear polyribonucleotide; transcribing the deoxyribonucleotide in a cell-free system to produce the linear polyribonucleotide; optionally purifying the splicing-compatible linear polyribonucleotide; and self-splicing the linear polyribonucleotide under conditions suitable for splicing of the 3′ and 5′ splice sites of the linear polyribonucleotide, thereby producing a circular polyribonucleotide.

[0360] In some embodiments, the disclosure provides a method of producing a circular polyribonucleotide by providing a deoxyribonucleotide encoding a linear polyribonucleotide; transcribing the deoxyribonucleotide in a cell-free system to produce the linear polyribonucleotide, wherein the transcribing occurs in a solution under conditions suitable for splicing of the 3′ and 5′ splice sites of the linear polyribonucleotide, thereby producing a circular polyribonucleotide. In some embodiments, the linear polyribonucleotide comprises a 5′ split-intron and a 3′ split-intron (e.g., a self-splicing construct for producing a circular polyribonucleotide). In some embodiments, the linear polyribonucleotide comprises a 5′ annealing region and a 3′ annealing region.

[0361] Suitable conditions for in vitro transcriptions and or self-splicing may include any conditions (e.g., a solution or a buffer, such as an aqueous buffer or solution) that mimic physiological conditions in one or more respects. In some embodiments, suitable conditions include between 0.1-100 mM Mg2+ ions or a salt thereof (e.g., 1-100 mM, 1-50 mM, 1-20 mM, 5-50 mM, 5-20 mM, or 5-15 mM). In some embodiments, suitable conditions include between 1-1000 mM K+ ions or a salt thereof such as KCl (e.g., 1-1000 mM, 1-500 mM, 1-200 mM, 50-500 mM, 100-500 mM, or 100-300 mM). In some embodiments, suitable conditions include between 1-1000 mM Cl− ions or a salt thereof such as KCl (e.g., 1-1000 mM, 1-500 mM, 1-200 mM, 50-500 mM, 100-500 mM, or 100-300 mM). In some embodiments, suitable conditions include between 0.1-100 mM Mn2+ ions or a salt thereof such as MnCl2 (e.g., 0.1-100 mM, 0.1-50 mM, 0.1-20 mM, 0.1-10 mM, 0.1-5 mM, 0.1-2 mM, 0.5-50 mM, 0.5-20 mM, 0.5-15 mM, 0.5-5 mM, 0.5-2 mM, or 0.1-10 mM). In some embodiments, suitable conditions include dithiothreitol (DTT) (e.g., 1-1000 μM, 1-500 μM, 1-200 μM, 50-500 μM, 100-500 μM, 100-300 μM, 0.1-100 mM, 0.1-50 mM, 0.1-20 mM, 0.1-10 mM, 0.1-5 mM, 0.1-2 mM, 0.5-50 mM, 0.5-20 mM, 0.5-15 mM, 0.5-5 mM, 0.5-2 mM, or 0.1-10 mM). In some embodiments, suitable conditions include between 0.1 mM and 100 mM ribonucleoside triphosphate (NTP) (e.g., 0.1-100 mM, 0.1-50 mM, 0.1-10 mM, 1-100 mM, 1-50 mM, or 1-10 mM). In some embodiments, suitable conditions include a pH of 4 to 10 (e.g., pH of 5 to 9, pH of 6 to 9, or pH of 6.5 to 8.5). In some embodiments, suitable conditions include a temperature of 4° C. to 50° C. (e.g., 10° C. to 40° C., 15° C. to 40° C., 20° C. to 40° C., or 30° C. to 40° C.),

[0362] In some embodiments the linear polyribonucleotide is produced from a deoxyribonucleic acid, e.g., a deoxyribonucleic acid described herein, such as a DNA vector, a linearized DNA vector, or a cDNA. In some embodiments, the linear polyribonucleotide is transcribed from the deoxyribonucleic acid by transcription in a cell-free system (e.g., in vitro transcription).

[0363] In another example, the circular polyribonucleotide may be produced in a cell, e.g., a prokaryotic cell or a eukaryotic cell. In some embodiments, an exogenous polyribonucleotide is provided to a cell (e.g., a linear polyribonucleotide described herein or a DNA molecule encoding for the transcription of a linear polyribonucleotide described here). The linear polyribonucleotides may be transcribed in the cell from an exogenous DNA molecule provided to the cell. The linear polyribonucleotide may be transcribed in the cell from an exogenous recombinant DNA molecule transiently provided to the cell. In some embodiments, the exogenous DNA molecule does not integrate into the cell's genome. In some embodiments, the linear polyribonucleotide is transcribed in the cell from a recombinant DNA molecule that is incorporated into the cell's genome.

[0364] In some embodiments, the cell is a prokaryotic cell. In some embodiments, the prokaryotic cell including the polyribonucleotides described herein may be a bacterial cell or an archaeal cell. For example, the prokaryotic cell including the polyribonucleotides described herein may be E coli, halophilic archaea (e.g., Haloferax volcaniii), Sphingomonas, cyanobacteria (e.g., Synechococcus elongatus, Spirulina (Arthrospira) spp., and Synechocystis spp.), Streptomyces, actinomycetes (e.g., Nonomuraea, Kitasatospora, or Thermobifida), Bacillus spp. (e.g., Bacillus subtilis, Bacillus anthracis, Bacillus cereus), betaproteobacteria (e.g., Burkholderia), alphaproteobacterial (e.g., Agrobacterium), Pseudomonas (e.g., Pseudomonas putida), and enterobacteria. The prokaryotic cells may be grown in a culture medium. The prokaryotic cells may be contained in a bioreactor.

[0365] The cell may be a eukaryotic cell. In some embodiments, the eukaryotic cell is a unicellular eukaryotic cell. In some embodiments, the unicellular eukaryotic is a unicellular fungal cell such as a yeast cell (e.g., Saccharomyces cerevisiae and other Saccharomyces spp., Brettanomyces spp., Schizosaccharomyces spp., Torulaspora spp, and Pichia spp.). In some embodiments, the unicellular eukaryotic cell is a unicellular animal cell. A unicellular animal cell may be a cell isolated from a multicellular animal and grown in culture, or the daughter cells thereof. In some embodiments, the unicellular animal cell may be dedifferentiated. In some embodiments, the unicellular eukaryotic cell is a unicellular plant cell. A unicellular plant cell may be a cell isolated from a multicellular plant and grown in culture, or the daughter cells thereof. In some embodiments, the unicellular plant cell may be dedifferentiated. In some embodiments, the unicellular plant cell is from a plant callus. In embodiments, the unicellular cell is a plant cell protoplast. In some embodiments, the unicellular eukaryotic cell is a unicellular eukaryotic algal cell, such as a unicellular green alga, a diatom, a euglenid, or a dinoflagellate. Non-limiting examples of unicellular eukaryotic algae of interest include Dunaliella salina, Chlorella vulgaris, Chlorella zofingiensis, Haematococcus pluvialis, Neochloris oleoabundans and other Neochloris spp., Protosiphon botryoides, Botryococcus braunii, Cryptococcus spp., Chlamydomonas reinhardtii and other Chlamydomonas spp. In some embodiments, the unicellular eukaryotic cell is a protist cell. In some embodiments, the unicellular eukaryotic cell is a protozoan cell.

[0366] In some embodiments, the eukaryotic cell is a cell of a multicellular eukaryote. For example, the multicellular eukaryote may be selected from the group consisting of a vertebrate animal, an invertebrate animal, a multicellular fungus, a multicellular alga, and a multicellular plant. In some embodiments, the eukaryotic organism is a human. In some embodiments, the eukaryotic organism is a non-human vertebrate animal. In some embodiments, the eukaryotic organism is an invertebrate animal. In some embodiments, the eukaryotic organism is a multicellular fungus. In some embodiments, the eukaryotic organism is a multicellular plant. In embodiments, the eukaryotic cell is a cell of a human or a cell of a non-human mammal such as a non-human primate (e.g., monkeys, apes), ungulate (e.g., bovids including cattle, buffalo, bison, sheep, goat, and musk ox; pig; camelids including camel, llama, and alpaca; deer, antelope; and equids including horse and donkey), carnivore (e.g., dog, cat), rodent (e.g., rat, mouse, guinea pig, hamster, squirrel), or lagomorph (e.g., rabbit, hare). In embodiments, the eukaryotic cell is a cell of a bird, such as a member of the avian taxa Galliformes (e.g., chickens, turkeys, pheasants, quail), Anseriformes (e.g., ducks, geese), Paleaognathae (e.g., ostriches, emus), Columbiformes (e.g., pigeons, doves), or Psittaciformes (e.g., parrots). In embodiments, the eukaryotic cell is a cell of an arthropod (e.g., insects, arachnids, crustaceans), a nematode, an annelid, a helminth, or a mollusc. In embodiments, the eukaryotic cell is a cell of a multicellular plant, such as an angiosperm plant (which can be a dicot or a monocot) or a gymnosperm plant (e.g., a conifer, a cycad, a gnetophyte, a Ginkgo), a fern, horsetail, clubmoss, or a bryophyte. In embodiments, the eukaryotic cell is a cell of a eukaryotic multicellular alga.

[0367] The eukaryotic cells may be grown in a culture medium. The eukaryotic cells may be contained in a bioreactor.

[0368] Examples of bioreactors include, without limitation, stirred tank (e.g., well mixed) bioreactors and tubular (e.g., plug flow) bioreactors, airlift bioreactors, membrane stirred tanks, spin filter stirred tanks, vibromixers, fluidized bed reactors, and membrane bioreactors. The mode of operating the bioreactor may be a batch or continuous processes. A bioreactor is continuous when the reagent and product streams are continuously being fed and withdrawn from the system. A batch bioreactor may have a continuous recirculating flow, but no continuous feeding of reagents or product harvest. Some methods of the present disclosure are directed to large-scale production of circular polyribonucleotides. For large-scale production methods, the method may be performed in a volume of 1 liter (L) to 50 L, or more (e.g., 5 L, 10 L, 15 L, 20 L, 25 L, 30 L, 35 L, 40 L, 45 L, 50 L, or more). In some embodiments, the method may be performed in a volume of 5 L to 10 L, 5 L to 15 L, 5 L to 20 L, 5 L to 25 L, 5 L to 30 L, 5 L to 35 L, 5 L to 40 L, 5 L to 45 L, 10 L to 15 L, 10 L to 20 L, 10 L to 25 L, 20 L to 30 L, 10 L to 35 L, 10 L to 40 L, 10 L to 45 L, 10 L to 50 L, 15 L to 20 L, 15 L to 25 L, 15 L to 30 L, 15 L to 35 L, 15 L to 40 L, 15 L to 45 L, or 15 to 50 L. In some embodiments, a bioreactor may produce at least 1 g of circular RNA. In some embodiments, a bioreactor may produce 1-200 g of circular RNA (e.g., 1-10 g, 1-20 g, 1-50 g, 10-50 g, 10-100 g, 50-100 g, of 50-200 g of circular RNA). In some embodiments, the amount produced is measured per liter (e.g., 1-200 g per liter), per batch or reaction (e.g., 1-200 g per batch or reaction), or per unit time (e.g., 1-200 g per hour or per day). In some embodiments, more than one bioreactor may be utilized in series to increase the production capacity (e.g., one, two, three, four, five, six, seven, eight, or nine bioreactors may be used in series).

[0369] Methods of making the circular polyribonucleotides described herein are described in, for example, Khudyakov & Fields, Artificial DNA: Methods and Applications, CRC Press (2002); in Zhao, SYNTHETIC BIOLOGY: TOOLS AND APPLICATIONS, (First Edition), Academic Press (2013); and Egli & Herdewijn, CHEMISTRY AND BIOLOGY OF ARTIFICIAL NUCLEIC ACIDS, (First Edition), Wiley-VCH (2012).

[0370] Various methods of synthesizing circular polyribonucleotides are also described elsewhere (see, e.g., U.S. Pat. Nos. 6,210,931, 5,773,244, 5,766,903, 5,712,128, 5,426,180, US Publication No. US20100137407, International Publication No. WO1992001813, International Publication No. WO2010084371, and Petkovic et al., Nucleic Acids Res. 43:2454-65 (2015); the contents of each of which are herein incorporated by reference in their entirety).

[0371] In some embodiments, the circular polyribonucleotide is purified, e.g., free ribonucleic acids, linear or nicked RNA, DNA, proteins, etc. are removed. In some embodiments, the circular polyribonucleotides may be purified by any known method commonly used in the art. Examples of nonlimiting purification methods include, column chromatography, gel excision, size exclusion, etc.

### Linear Polyribonucleotide

[0372] The linear polyribonucleotides as disclosed herein comprise one or more expression sequences encoding one or more immunogens and/or epitopes from a coronavirus. This linear polyribonucleotide expresses the sequence encoding the one or more immunogens and/or epitopes from the coronavirus in a subject. In some embodiments, linear polyribonucleotides comprising one or more coronavirus immunogens and/or epitopes are used to produce an immune response in a subject. In some embodiments, linear polyribonucleotides comprising one or more coronavirus immunogens and/or epitopes are used to produce polyclonal antibodies as described herein.

### Coronavirus Immunogens and Epitopes

[0373] The linear polyribonucleotide comprises a sequence encoding a coronavirus immunogen or epitope. The immunogens and/or epitopes disclosed herein are associated with coronaviruses. In some embodiments, the immunogens and/or epitopes are expressed by a coronavirus or derived from an immunogen and/or epitope that is expressed by a coronavirus.

[0374] In some embodiments, an immunogen and/or epitope of the disclosure is from a predicted transcript from a SARS-CoV genome. In some embodiments, an immunogen and/or epitope of the disclosure is from a protein encoded by an open reading frame from a SARS-CoV genome. Non-limiting examples of open reading frames in SARS-CoV genomes can include ORF1a, ORF1b, spike (S), ORF3a, ORF3b, envelope (E), membrane (M), ORF6, ORF7a, ORF7b, ORF8, ORF8a, ORF8b, ORF9a, ORF9b, nucleocapsid (N), and ORF10. In some embodiments, the open reading frame from the SARS-CoV genome includes SEQ ID NO: 11.

[0375] In particular embodiments, a linear polyribonucleotide comprises a SARS-CoV-2 immunogen described in TABLE 6.

TABLE 6
Descriptions of designed linear constructs.

| | ORF | | | | | | |
|---|---|---|---|---|---|---|---|
| | (SEQ | ORF | Proline | Cloning | Circularization | 5′ | 3′ |
| Construct | ID NO.) | Description | substitutions | optimization | optimization | element | element |
| p29 | 1 (13) | S protein | Yes | Yes | No | globin | globin |
| | | transmembrane | | | | | |
| | | (TM) domain | | | | | |
| | | completely | | | | | |
| | | removed, and a | | | | | |
| | | trimerization | | | | | |
| | | domain added | | | | | |
| p30 | 3 (15) | S protein | Yes | Yes | No | globin | globin |
| | | transmembrane | | | | | |
| | | (TM) domain | | | | | |
| | | fully intact | | | | | |
| p31 | 13 (12) | S protein | N/A | N/A | N/A | globin | globin |
| | | receptor binding | | | | | |
| | | domain (RBD) | | | | | |
| | | only with | | | | | |
| | | secretion signal | | | | | |
| | | translationally | | | | | |
| | | fused to the 5′ | | | | | |
| | | end | | | | | |
| p32 | 1 (13) | S protein | Yes | Yes | Yes | globin | globin |
| | | transmembrane | | | | | |
| | | (TM) domain | | | | | |
| | | completely | | | | | |
| | | removed, and a | | | | | |
| | | trimerization | | | | | |
| | | domain added | | | | | |

[0376] In TABLE 6, “proline substitutions” denotes proline substitutions that are at residues 986 and 987, as well as a “GSAS” substitution (SEQ ID NO: 336) at the furin cleavage site (residues 682-685). For cloning optimization, single base substitution was made at coordinate 2541 to destroy a Bsal site to assist in Golden Gate Cloning construction of the plasmid DNA template. For circularization optimizations, four single nucleotides—at positions 2307, 2709, 159 and 315—were substituted to destroy sites that could potentially bind circularization elements of splint nucleic acid sequences, thereby potentially inhibiting efficient ligation. All single bp substitutions were designed to be translationally silent. Further, in TABLE 6, the 5′ Element is Globin (SEQ ID NO: 32); and the 3′ Element: Globin (SEQ ID NO: 33).

[0377] In some embodiments, the linear polyribonucleotide includes an open reading frame encoding a SARS-CoV-2 immunogen having an amino acid sequence that is at least about 80% (e.g., about 81%, 82%, 83%, 84%, 85%, 86%, 87%, 88%, 89%, 90%, 91%, 92%, 93%, 94%, 95%, 96%, 97%, 98%, 99%, or 100%) identical to any one of SEQ ID NOs: 63-111 and 293-295. In some embodiments, the linear polyribonucleotide includes an open reding frame encoding a SARS-CoV-2 immunogen having an amino acid sequence that is at least about 90% (e.g., about 91%, 92%, 93%, 94%, 95%, 96%, 97%, 98%, 99%, or 100%) identical to any one of SEQ ID NOs: 63-111 and 293-295. In some embodiments, the linear polyribonucleotide includes an open reading frame encoding a SARS-CoV-2 immunogen having an amino acid sequence that is at least about 95% (e.g., about 96%, 97%, 98%, 99%, or 100%) identical to any one of SEQ ID NOs: 63-111 and 293-295. In some embodiments, the linear polyribonucleotide includes an open reading frame encoding a SARS-CoV-2 immunogen having an amino acid sequence that is any one of SEQ ID NOs: 63-111 and 293-295. In some embodiments, the SARS-CoV-2 immunogen is an immunogenic fragment including a contiguous stretch of at least 100, 150, 200, 250, 300, 350, 400, 450, 500, 550, 600, 650, 700, 750, 800, 850, 900, 950, 1000, 1100, 1200, 1300, 1400, or 1500 amino acids of any one of SEQ ID NOs: 63-111 and 293-295. In some embodiments, the SARS-CoV-2 immunogen is an immunogenic fragment including a contiguous stretch of at least 50%, 60%, 70%, 80%, 90%, or 95% of the amino acids of a sequence any one of SEQ ID NOs: 63-111 and 293-295.

[0378] In particular embodiments, the linear polyribonucleotide includes an open reading frame with a nucleic acid sequence encoding a SARS-CoV-2 immunogen, wherein the nucleic acid sequence has at least about 80% (e.g., about 81%, 82%, 83%, 84%, 85%, 86%, 87%, 88%, 89%, 90%, 91%, 92%, 93%, 94%, 95%, 96%, 97%, 98%, 99%, or 100%) sequence identity to any one of SEQ ID NOs: 112-174 and 292-300. In some embodiments, the linear polyribonucleotide includes an open reading frame with a nucleic acid sequence encoding a SARS-CoV-2 immunogen, wherein the nucleic acid sequence has at least about 90% (e.g., about 91%, 92%, 93%, 94%, 95%, 96%, 97%, 98%, 99%, or 100%) sequence identity to any one of SEQ ID NOs: 112-174 and 292-300. In some embodiments, the linear polyribonucleotide includes an open reading frame with a nucleic acid sequence encoding a SARS-CoV-2 immunogen, wherein the nucleic acid sequence has at least about 95% (e.g., about 96%, 97%, 98%, 99%, or 100%) sequence identity to any one of SEQ ID NOs: 112-174 and 292-300. In certain embodiments, the linear polyribonucleotide includes an open reading frame with a nucleic acid sequence encoding a SARS-CoV-2 immunogen, wherein the nucleic acid sequence is any one of SEQ ID NOs: 112-174 and 292-300. In some embodiments, the polyribonucleotide sequence encoding the SARS-CoV-2 immunogen is a fragment including a contiguous stretch of at least 300, 400, 500, 600, 700, 800, 900, 1000, 1100, 1200, 1500, 2000, 2500, 3000, 3500, 4000, or 4500 nucleotides of any one of SEQ ID NOs: 112-174 and 292-300. In some embodiments, the polyribonucleotide sequence encoding the SARS-CoV-2 immunogen is a fragment including a contiguous stretch of at least 50%, 60%, 70%, 80%, 90%, or 95% of the amino acids of any one of SEQ ID NOs: 112-174 and 292-300.

[0379] In particular embodiments, the linear polyribonucleotide includes an open reading frame with a nucleic acid sequence encoding a SARS-CoV-2 immunogen, wherein the nucleic acid sequence has at least about 80% (e.g., about 81%, 82%, 83%, 84%, 85%, 86%, 87%, 88%, 89%, 90%, 91%, 92%, 93%, 94%, 95%, 96%, 97%, 98%, 99%, or 100%) sequence identity to any one of SEQ ID NOs: 219-281. In some embodiments, the linear polyribonucleotide includes an open reading frame with a nucleic acid sequence encoding a SARS-CoV-2 immunogen, wherein the nucleic acid sequence has at least about 90% (e.g., about 91%, 92%, 93%, 94%, 95%, 96%, 97%, 98%, 99%, or 100%) sequence identity to any one of SEQ ID NOs: 219-281. In some embodiments, the linear polyribonucleotide includes an open reading frame with a nucleic acid sequence encoding a SARS-CoV-2 immunogen, wherein the nucleic acid sequence has at least about 95% (e.g., about 96%, 97%, 98%, 99%, or 100%) sequence identity to any one of SEQ ID NOs: 219-281. In certain embodiments, the linear polyribonucleotide includes an open reading frame with a nucleic acid sequence encoding a SARS-CoV-2 immunogen, wherein the nucleic acid sequence is any one of SEQ ID NOs: 219-281. In some embodiments, the polyribonucleotide sequence encoding the SARS-CoV-2 immunogen is a fragment including a contiguous stretch of at least 300, 400, 500, 600, 700, 800, 900, 1000, 1100, 1200, 1500, 2000, 2500, 3000, 3500, 4000, or 4500 nucleotides of any one of SEQ ID NOs: 219-281. In some embodiments, the polyribonucleotide sequence encoding the SARS-CoV-2 immunogen is a fragment including a contiguous stretch of at least 50%, 60%, 70%, 80%, 90%, or 95% of the amino acids of any one of SEQ ID NOs: 219-281.

[0380] The disclosure specifically contemplates that any of the DNA sequences described herein may be converted to the corresponding RNA sequence and included in an RNA molecule described herein.

[0381] In some embodiments, a coronavirus epitope comprises or contains at least 4, at least 5, at least 6, at least 7, at least 8, at least 9, at least 10, at least 11, at least 12, at least 13, at least 14, at least 15, at least 16, at least 17, at least 18, at least 19, at least 20, at least 21, at least 22, at least 23, at least 24, at least 25, at least 26, at least 27, at least 28, at least 29, or at least 30 amino acids, or more. In some embodiments, a coronavirus epitope comprises or contains at most 4, at most 5, at most 6, at most 7, at most 8, at most 9, at most 10, at most 11, at most 12, at most 13, at most 14, at most 15, at most 16, at most 17, at most 18, at most 19, at most 20, at most 21, at most 22, at most 23, at most 24, at most 25, at most 26, at most 27, at most 28, at most 29, or at most 30 amino acids, or less. In some embodiments, a coronavirus epitope comprises or contains 1, 2, 3, 4, 5, 6, 7, 8, 9, 10, 11, 12, 13, 14, 15, 16, 17, 18, 19, 20, 21, 22, 23, 24, 25, 26, 27, 28, 29, or 30 amino acids. In some embodiments, a coronavirus epitope contains 5 amino acids. In some embodiments, a coronavirus epitope contains 6 amino acids. In some embodiments, an epitope contains 7 amino acids. In some embodiments, a coronavirus epitope contains 8 amino acids. In some embodiments, an epitope can be about 8 to about 11 amino acids. In some embodiments, an epitope can be about 9 to about 22 amino acids.

[0382] The coronavirus immunogens may comprise immunogens recognized by B cells, immunogens recognized by T cells, or a combination thereof. In some embodiments, the immunogens comprise immunogens recognized by B cells. In some embodiments, the coronavirus immunogens are immunogens recognized by B cells. In some embodiments, the coronavirus immunogens comprise immunogens recognized by T cells. In some embodiments, the immunogens are immunogens recognized by T cells.

[0383] The coronavirus epitopes comprise epitopes recognized by B cells, epitopes recognized by T cells, or a combination thereof. In some embodiments, the coronavirus epitopes comprise epitopes recognized by B cells. In some embodiments, the epitopes are epitopes recognized by B cells. In some embodiments, the coronavirus epitopes comprise epitopes recognized by T cells. In some embodiments, the coronavirus epitopes are epitopes recognized by T cells.

[0384] Techniques for identifying immunogens and epitopes in silico have been disclosed, for example, in Sanchez-Trincado, et al. (2017), Fundamentals and methods for T-and B-cell epitope prediction, JOURNAL OF IMMUNOLOGY RESEARCH; Grifoni, Alba, et al. A Sequence Homology and Bioinformatic Approach Can Predict Candidate Targets for Immune Responses to SARS-CoV-2. CELL HOST & MICROBE (2020); Russi et al., In silico prediction of T-and B-cell epitopes in PmpD: First step towards to the design of a Chlamydia trachomatis vaccine. BIOMEDICAL JOURNAL 41.2 (2018): 109-17; Baruah, et al., Immunoinformatics-aided identification of T cell and B cell epitopes in the surface glycoprotein of 2019-nCoV, JOURNAL OF MEDICAL VIROLOGY (2020); each of which is incorporated herein by reference in its entirety.

[0385] A linear polyribonucleotide of the disclosure may comprise sequences of any number of coronavirus immunogens and/or epitopes. A linear polyribonucleotide comprises a sequence, for example, of at least 1, at least 2, at least 3, at least 4, at least 5, at least 6, at least 7, at least 8, at least 9, at least 10, at least 15, at least 20, at least 25, at least 30, at least 40, at least 50, at least 60, at least 70, at least 80, at least 90, at least 100, at least 120, at least 140, at least 160, at least 180, at least 200, at least 250, at least 300, at least 350, at least 400, at least 450, at least 500, or more coronavirus immunogens or epitopes. In some embodiments, a linear polyribonucleotide comprises a sequence, for example, of at least 1, at least 2, at least 3, at least 4, at least 5, at least 6, at least 7, at least 8, at least 9, at least 10, at least 15, at least 20, at least 25, at least 30, at least 40, at least 50, at least 60, at least 70, at least 80, at least 90, at least 100, at least 120, at least 140, at least 160, at least 180, at least 200, at least 250, at least 300, at least 350, at least 400, at least 450, at least 500, or more immunogens or epitopes derived from a target other than a coronavirus.

[0386] In some embodiments, a linear polyribonucleotide comprises a sequence for example, of at most 1, at most 2, at most 3, at most 4, at most 5, at most 6, at most 7, at most 8, at most 9, at most 10, at most 15, at most 20, at most 25, at most 30, at most 40, at most 50, at most 60, at most 70, at most 80, at most 90, at most 100, at most 120, at most 140, at most 160, at most 180, at most 200, at most 250, at most 300, at most 350, at most 400, at most 450, at most 500, or less coronavirus immunogens or epitopes. In some embodiments, a linear polyribonucleotide comprises a sequence for example, of at most 1, at most 2, at most 3, at most 4, at most 5, at most 6, at most 7, at most 8, at most 9, at most 10, at most 15, at most 20, at most 25, at most 30, at most 40, at most 50, at most 60, at most 70, at most 80, at most 90, at most 100, at most 120, at most 140, at most 160, at most 180, at most 200, at most 250, at most 300, at most 350, at most 400, at most 450, at most 500, or less immunogens or epitopes derived from a target other than a coronavirus

[0387] In some embodiments, a linear polyribonucleotide comprises a sequence, for example, of about 1, 2, 3, 4, 5, 6, 7, 8, 9, 10, 15, 20, 25, 30, 40, 50, 60, 70, 80, 90, 100, 120, 140, 160, 180, 200, 250, 300, 350, 400, 450, or 500 coronavirus immunogens or epitopes. In some embodiments, a linear polyribonucleotide comprises a sequence, for example, of about 1, 2, 3, 4, 5, 6, 7, 8, 9, 10, 15, 20, 25, 30, 40, 50, 60, 70, 80, 90, 100, 120, 140, 160, 180, 200, 250, 300, 350, 400, 450, or 500 immunogens or epitopes derived from a source other than a coronavirus.

[0388] A linear polyribonucleotide may comprise a sequence for one or more coronavirus epitopes from a coronavirus immunogen. For example, a coronavirus immunogen can comprise an amino acid sequence, which can contain multiple coronavirus epitopes (e.g., epitopes recognized by a B cell and/or a T cell) therein, and a linear polyribonucleotide can comprise or encode one or more of those coronavirus epitopes.

[0389] A linear polyribonucleotide comprises a sequence, for example, of at least 1, at least 2, at least 3, at least 4, at least 5, at least 6, at least 7, at least 8, at least 9, at least 10, at least 15, at least 20, at least 25, at least 30, at least 40, at least 50, at least 60, at least 70, at least 80, at least 90, at least 100, at least 120, at least 140, at least 160, at least 180, at least 200, at least 250, at least 300, at least 350, at least 400, at least 450, at least 500, or more epitopes from one coronavirus immunogen.

[0390] In some embodiments, a linear polyribonucleotide comprises, for example, a sequence of at most 2, at most 3, at most 4, at most 5, at most 6, at most 7, at most 8, at most 9, at most 10, at most 15, at most 20, at most 25, at most 30, at most 40, at most 50, at most 60, at most 70, at most 80, at most 90, at most 100, at most 120, at most 140, at most 160, at most 180, at most 200, at most 250, at most 300, at most 350, at most 400, at most 450, or at most 500, or less coronavirus epitopes from one coronavirus immunogen.

[0391] In some embodiments, a linear polyribonucleotide comprises a sequence, for example, of about 1, 2, 3, 4, 5, 6, 7, 8, 9, 10, 15, 20, 25, 30, 40, 50, 60, 70, 80, 90, 100, 120, 140, 160, 180, 200, 250, 300, 350, 400, 450, or 500 coronavirus epitopes from one coronavirus immunogen.

[0392] A linear polyribonucleotide may encode variants of a coronavirus immunogen or epitope. Variants may be naturally occurring variants (for example, variants identified in sequence data from different coronavirus genera, species, isolates, or quasi-species), or may be derivative sequences as disclosed herein that have been generated in silico (for example, immunogen or epitopes with one or more amino acid insertions, deletions, substitutions, or a combination thereof compared to a wild type immunogen or epitope).

[0393] A linear polyribonucleotide comprises a sequence, for example, of at least 1, at least 2, at least 3, at least 4, at least 5, at least 6, at least 7, at least 8, at least 9, at least 10, at least 15, at least 20, at least 25, at least 30, at least 40, at least 50, at least 60, at least 70, at least 80, at least 90, at least 100, at least 120, at least 140, at least 160, at least 180, at least 200, at least 250, at least 300, at least 350, at least 400, at least 450, at least 500, or more variants of a coronavirus immunogen or epitope.

[0394] In some embodiments, a linear polyribonucleotide comprises a sequence, for example, of at most 2, at most 3, at most 4, at most 5, at most 6, at most 7, at most 8, at most 9, at most 10, at most 15, at most 20, at most 25, at most 30, at most 40, at most 50, at most 60, at most 70, at most 80, at most 90, at most 100, at most 120, at most 140, at most 160, at most 180, at most 200, at most 250, at most 300, at most 350, at most 400, at most 450, at most 500, or less variants of a coronavirus immunogen or epitope.

[0395] In some embodiments, a linear polyribonucleotide comprises a sequence, for example, of about 1, 2, 3, 4, 5, 6, 7, 8, 9, 10, 15, 20, 25, 30, 40, 50, 60, 70, 80, 90, 100, 120, 140, 160, 180, 200, 250, 300, 350, 400, 450, or 500 variants of a coronavirus immunogen or epitope.

[0396] A coronavirus immunogen and/or epitope sequence of a linear polyribonucleotide can also be referred to as a coronavirus expression sequence. In some embodiments, the linear polyribonucleotide comprises one or more coronavirus expression sequences, each of which may encode a coronavirus polypeptide. The coronavirus polypeptide may be produced in substantial amounts. A coronavirus polypeptide can be a coronavirus polypeptide that is secreted from a cell, or localized to the cytoplasm, nucleus or membrane compartment of a cell. Some coronavirus polypeptides include, but are not limited to, an immunogen as disclosed herein, an epitope as disclosed herein, at least a portion of a coronavirus protein (for example, a viral envelope protein, viral matrix protein, viral spike protein, viral membrane protein, viral nucleocapsid protein, viral accessory protein, a fragment thereof, or a combination thereof). In some embodiments, a coronavirus polypeptide encoded by a linear polyribonucleotide of the disclosure comprises a fragment of a coronavirus immunogen disclosed herein. In some embodiments, a coronavirus polypeptide encoded by a linear polyribonucleotide of the disclosure comprises a fusion protein comprising two or more coronavirus immunogens disclosed herein, or fragments thereof. In some embodiments, a coronavirus polypeptide encoded by a linear polyribonucleotide of the disclosure comprises a coronavirus epitope. In some embodiments, a polypeptide encoded by a linear polyribonucleotide of the disclosure comprises a fusion protein comprising two or more coronavirus epitopes disclosed herein, for example, an artificial peptide sequence comprising a plurality of predicted epitopes from one or more coronavirus of the disclosure.

[0397] In some embodiments, exemplary coronavirus proteins that are expressed from the linear polyribonucleotide disclosed herein include a secreted protein, for example, a protein (e.g., immunogen and/or epitope) that naturally includes a signal peptide, or one that does not usually encode a signal peptide but is modified to contain one.

### Linear Polyribonucleotide Elements

[0398] The linear polyribonucleotide comprises the elements as described below as well as the coronavirus immunogen or epitope as described herein.

[0399] Linear polyribonucleotides described herein are a polyribonucleotide molecule having a 5′ and 3′ end. In some embodiments, the linear RNA has a free 5′ end or 3′ end. In some embodiments, the linear RNA has a 5′ end or 3′ end that is modified or protected from degradation. In some embodiments, the linear RNA has non-covalently linked 5′ or 3′ ends. In some embodiments, the linear RNA is an mRNA.

[0400] In some embodiments, the linear polyribonucleotide is at least about 20 nucleotides, at least about 30 nucleotides, at least about 40 nucleotides, at least about 50 nucleotides, at least about 75 nucleotides, at least about 100 nucleotides, at least about 200 nucleotides, at least about 300 nucleotides, at least about 400 nucleotides, at least about 500 nucleotides, at least about 1,000 nucleotides, at least about 2,000 nucleotides, at least about 5,000 nucleotides, at least about 6,000 nucleotides, at least about 7,000 nucleotides, at least about 8,000 nucleotides, at least about 9,000 nucleotides, at least about 10,000 nucleotides, at least about 12,000 nucleotides, at least about 14,000 nucleotides, at least about 15,000 nucleotides, at least about 16,000 nucleotides, at least about 17,000 nucleotides, at least about 18,000 nucleotides, at least about 19,000 nucleotides, or at least about 20,000 nucleotides.

[0401] The linear polyribonucleotides of the disclosure may include any element or combination of elements described herein, e.g., any element or combination of elements described above with respect to circular polyribonucleotides. A linear polyribonucleotide may include any one or more IRES, signal sequence, regulatory element, cleavage domain, translation initiation sequence, untranslated region, termination element, or modification as described herein (e.g., with respect to circular polyribonucleotide described above). A linear polyribonucleotide may include such elements in any number or configuration described herein (e.g., with respect to circular polyribonucleotide described above).

### Methods of Producing an Immune Response

[0402] The disclosure provides immunogenic compositions comprising a circular polyribonucleotide described above. The disclosure provides immunogenic compositions comprising a linear polyribonucleotide described above. Immunogenic compositions of the invention may comprise a diluent or a carrier, adjuvant, or any combination thereof. Immunogenic compositions of the invention may also comprise one or more immunoregulatory agents, e.g., one or more adjuvants. The adjuvants may include a TH1 adjuvant and/or a TH2 adjuvant, further discussed below. In some embodiments, the immunogenic composition comprises a diluent free of any carrier and is used for naked delivery of the circular polyribonucleotide to a subject (e.g., a subject for immunization). In some embodiments, the immunogenic composition comprises a diluent free of any carrier and is used for naked delivery of the linear polyribonucleotide to a subject.

[0403] Immunogenic compositions of the invention are used to raise an immune response in a subject (e.g., a subject for immunization). The immune response may comprise an antibody response (usually including IgG) and/or a cell-mediated immune response. In some embodiments, the immunogenic compositions are used to produce polyclonal antibodies as described herein. For example, a subject is immunized with an immunogenic composition comprising a circular polyribonucleotide comprising a coronavirus immunogen and/or epitope to stimulate production of polyclonal antibodies that bind to the coronavirus immunogen and/or epitope. In another example, a subject is immunized with an immunogenic composition comprising a linear polyribonucleotide comprising a coronavirus immunogen and/or epitope to stimulate production of polyclonal antibodies that bind to the coronavirus immunogen and/or epitope. In some embodiments, the subject is a human. In some embodiments, the subject is a non-human animal. In some embodiments, the non-human animal has a humanized immune system. In some embodiments, the subject is further immunized with an adjuvant. In some embodiments the subject is further immunized with a vaccine. Optionally, after immunization with the immunogenic composition comprising the circular polyribonucleotide, the produced polyclonal antibodies are collected and purified from the subject. Optionally, after immunization with the immunogenic composition comprising the linear polyribonucleotide, the produced polyclonal antibodies are collected and purified from the subject. In some embodiments, a composition comprises plasma collected after administration of the immunogenic composition described herein.

### Immunization

[0404] In some embodiments, methods of the disclosure comprise immunizing a subject (e.g., a subject for immunization) with an immunogenic composition comprising a circular polyribonucleotide as disclosed herein. In some embodiments, a coronavirus immunogen and/or epitope is expressed from the circular polyribonucleotide. In some embodiments, immunization induces an immune response in a subject against the coronavirus immunogen and/or epitope expressed from the circular polyribonucleotide. In some embodiments, immunization induces the production of polyclonal antibodies that bind to the coronavirus immunogen and/or epitope expressed immunogenic composition. In some embodiments, the immunogenic composition comprises the circular polyribonucleotide and a diluent, carrier, first adjuvant or a combination thereof in a single composition. In some embodiments, the subject is further immunized with a second adjuvant. In some embodiments, the subject is further immunized with a vaccine.

[0405] In some embodiments, methods of the disclosure comprise immunizing a subject (e.g., a subject for immunization) with an immunogenic composition comprising a linear polyribonucleotide as disclosed herein. In some embodiments, a coronavirus immunogen and/or epitope is expressed from the linear polyribonucleotide. In some embodiments, immunization induces an immune response in a subject against the coronavirus immunogen and/or epitope expressed from the linear polyribonucleotide. In some embodiments, immunization induces the production of polyclonal antibodies that bind to the coronavirus immunogen and/or epitope expressed from the linear polyribonucleotide. In some embodiments, an immunogenic composition comprises the linear polyribonucleotide and a diluent, carrier, first adjuvant or a combination thereof in a single composition. In some embodiments, the subject is further immunized with a second adjuvant. In some embodiments, the subject is further immunized with a vaccine.

[0406] The circular polyribonucleotide as disclosed herein stimulates the production of human polyclonal antibodies by stimulating the adaptive immune response after immunization of a subject (e.g., a subject for immunization). In some embodiments, the adaptive immune response of the subject comprises a stimulation of B lymphocytes to release polyclonal antibodies that specifically bind to the coronavirus immunogen expressed by the circular polyribonucleotide. The linear polyribonucleotide as disclosed herein stimulates the production of human polyclonal antibodies by stimulating the adaptive immune response after immunization of a subject. In some embodiments, the adaptive immune response of the subject comprises a stimulation of B lymphocytes to release polyclonal antibodies that specifically bind to the coronavirus immunogen expressed by the linear polyribonucleotide. In some embodiments, the adaptive immune response of the subject comprises stimulating cell-mediated immune responses.

[0407] The subject (e.g., a subject for immunization) is immunized with one or more immunogenic composition(s) comprising any number of circular polyribonucleotides. The subject is immunized with, for example, one or more immunogenic composition(s) comprising at least 1 circular polyribonucleotide. A non-human animal having a non-humanized immune system is immunized with, for example, one or more immunogenic composition(s) comprising at least 2, at least 3, at least 4, at least 5, at least 6, at least 7, at least 8, at least 9, at least 10, at least 11, at least 12, at least 13, at least 14, at least 15, at least 20 different circular polyribonucleotides, or more different circular polyribonucleotides. In some embodiments, a subject is immunized with one or more immunogenic composition(s) comprising at most 1 circular polyribonucleotide. In some embodiments, a subject is immunized with one or more immunogenic composition(s) comprising about 1 circular polyribonucleotide. In some embodiments, a subject is immunized with one or more immunogenic composition(s) comprising about 1-20, 1-15, 1-10, 1-9, 1-8, 1-7, 1-6, 1-5, 1-4, 1-3, 1-2, 2-20, 2-15, 2-10, 2-9, 2-8, 2-7, 2-6, 2-5, 2-4, 2-3, 3-20, 3-15, 3-10, 3-9, 3-8, 3-7, 3-6, 3-5, 3-4, 4-20, 4-15, 4-10, 4-9, 4-8, 4-7, 4-6, 4-5, 4-4, 4-3, 5-20, 5-15, 5-10, 5-9, 5-8, 5-7, 5-6, 5-10, 10-15, or 15-20 different circular polyribonucleotides. Different circular polyribonucleotides have different sequences from each other. For example, they can comprise or encode different immunogens and/or epitopes, overlapping immunogens and/or epitopes, similar immunogens and/or epitopes, or the same immunogens and/or epitopes (for example, with the same or different regulatory elements, initiation sequences, promoters, termination elements, or other elements of the disclosure). In cases where a subject is immunized with one or more immunogenic composition(s) comprising two or more different circular polyribonucleotides, the two or more different circular polyribonucleotides can be in the same or different immunogenic compositions and immunized at the same time or at different times. The immunogenic compositions comprising two or more different circular polyribonucleotides can be administered to the same anatomical location or different anatomical locations.

[0408] The two or more different circular polyribonucleotides can comprise or encode immunogens and/or epitopes from the same coronavirus, different coronavirus, or different combinations of coronaviruses disclosed herein. The two or more different circular polyribonucleotides can comprise or encode immunogens and/or epitopes from the same coronavirus or from different coronaviruses, for example, different isolates.

[0409] The subject (e.g., a subject for immunization) is immunized with one or more immunogenic composition(s) comprising any number of linear polyribonucleotides. The subject is immunized with, for example, one or more immunogenic composition(s) comprising at least 1 linear polyribonucleotide. A non-human animal having a non-humanized immune system is immunized with, for example, one or more immunogenic composition(s) comprising at least 2, at least 3, at least 4, at least 5, at least 6, at least 7, at least 8, at least 9, at least 10, at least 11, at least 12, at least 13, at least 14, at least 15, at least 20 different linear polyribonucleotides, or more different linear polyribonucleotides. In some embodiments, a subject is immunized with one or more immunogenic composition(s) comprising at most 1 linear polyribonucleotide. In some embodiments, a subject is immunized with one or more immunogenic composition(s) comprising about 1 linear polyribonucleotide. In some embodiments, a subject is immunized with one or more immunogenic composition(s) comprising about 1-20, 1-15, 1-10, 1-9, 1-8, 1-7, 1-6, 1-5, 1-4, 1-3, 1-2, 2-20, 2-15, 2-10, 2-9, 2-8, 2-7, 2-6, 2-5, 2-4, 2-3, 3-20, 3-15, 3-10, 3-9, 3-8, 3-7, 3-6, 3-5, 3-4, 4-20, 4-15, 4-10, 4-9, 4-8, 4-7, 4-6, 4-5, 4-4, 4-3, 5-20, 5-15, 5-10, 5-9, 5-8, 5-7, 5-6, 5-10, 10-15, or 15-20 different linear polyribonucleotides. Different linear polyribonucleotides have different sequences from each other. For example, they can comprise or encode different immunogens and/or epitopes, overlapping immunogens and/or epitopes, similar immunogens and/or epitopes, or the same immunogens and/or epitopes (for example, with the same or different regulatory elements, initiation sequences, promoters, termination elements, or other elements of the disclosure). In cases where a subject is immunized with one or more immunogenic composition(s) comprising two or more different linear polyribonucleotides, the two or more different linear polyribonucleotides can be in the same or different immunogenic compositions and immunized at the same time or at different times. The immunogenic compositions comprising two or more different linear polyribonucleotides can be administered to the same anatomical location or different anatomical locations.

[0410] The two or more different linear polyribonucleotides can comprise or encode immunogens and/or epitopes from the same coronavirus, different coronavirus, or different combinations of coronaviruses disclosed herein. The two or more different linear polyribonucleotides can comprise or encode immunogens and/or epitopes from the same coronavirus or from different coronaviruses, for example, different isolates.

[0411] In some embodiments, the subject (e.g., a subject for immunization) is immunized with one or more immunogenic composition(s) comprising any number of circular polyribonucleotides and one or more immunogenic composition(s) comprising any number of linear polyribonucleotides as disclosed herein. In some embodiments, an immunogenic composition disclosed herein comprises one or more circular polyribonucleotides and one or more linear polyribonucleotides as disclosed herein.

[0412] In some embodiments, an immunogenic composition comprises a circular polyribonucleotide and a diluent, a carrier, a first adjuvant, or a combination thereof. In a particular embodiment, an immunogenic composition comprises a circular polyribonucleotide described herein and a carrier or a diluent free of any carrier. In some embodiments, an immunogenic composition comprising a circular polyribonucleotide with a diluent free of any carrier is used for naked delivery of the circular polyribonucleotide to a subject. In another particular embodiment, an immunogenic composition comprises a circular polyribonucleotide described herein and a first adjuvant.

[0413] In certain embodiments, a subject (e.g., a subject for immunization) is further administered a second adjuvant. An adjuvant enhances the innate immune response, which in turn enhances the adaptive immune response for the production of polyclonal antibodies in a subject. An adjuvant can be any adjuvant as discussed below. In certain embodiments, an adjuvant is formulated with the circular polyribonucleotide as a part of an immunogenic composition. In certain embodiments, an adjuvant is not part of an immunogenic composition comprising the circular polyribonucleotide. In certain embodiments, an adjuvant is administered separately from an immunogenic composition comprising the circular polyribonucleotide. In this aspect, the adjuvant is co-administered (e.g., administered simultaneously) or administered at a different time than an immunogenic composition comprising the circular polyribonucleotide to the subject. For example, the adjuvant is administered 1 minute, 5 minutes, 10 minutes, 15 minutes, 30 minutes, 45 minutes, 60 minutes, 90 minutes, 2 hours, 3 hours, 4 hours, 5 hours, 6 hours, 7 hours, 8 hours, 9 hours, 10 hours, 12 hours, 14 hours, 16 hours, 18 hours, 20 hours, 22 hours, or 24 hours, or any minute or hour therebetween, after an immunogenic composition comprising the circular polyribonucleotide. In some embodiments, the adjuvant is administered 1 minute, 5 minutes, 10 minutes, 15 minutes, 30 minutes, 45 minutes, 60 minutes, 90 minutes, 2 hours, 3 hours, 4 hours, 5 hours, 6 hours, 7 hours, 8 hours, 9 hours, 10 hours, 12 hours, 14 hours, 16 hours, 18 hours, 20 hours, 22 hours, or 24 hours, or any minute or hour therebetween, before an immunogenic composition comprising the circular polyribonucleotide. For example, the adjuvant is administered 1, 2, 3, 4, 5, 6, 7, 14, 21, 28, 35, 42, 49, 56, 63, 70, 77, or 84 days, or any day therebetween, after an immunogenic composition comprising the circular polyribonucleotide. In some embodiments, the adjuvant is administered 1, 2, 3, 4, 5, 6, 7, 14, 21, 28, 35, 42, 49, 56, 63, 70, 77, or 84 days, or any day therebetween, before an immunogenic composition comprising the circular polyribonucleotide. The adjuvant is administered to the same anatomical location or different anatomical location as the immunogenic composition comprising the circular polyribonucleotide.

[0414] In some embodiments, an immunogenic composition comprises a linear polyribonucleotide and a diluent, a carrier, a first adjuvant, or a combination thereof. In a particular embodiment, an immunogenic composition comprises a linear polyribonucleotide described herein and a carrier or a diluent free of any carrier. In some embodiments, an immunogenic composition comprising a linear polyribonucleotide with a diluent free of any carrier is used for naked delivery of the linear polyribonucleotide to a subject (e.g., a subject for immunization). In another particular embodiment, an immunogenic composition comprises a linear polyribonucleotide described herein and a first adjuvant.

[0415] In certain embodiments, a subject (e.g., a subject for immunization) is further administered a second adjuvant. An adjuvant enhances the innate immune response, which in turn enhances the adaptive immune response for the production of polyclonal antibodies in a subject. An adjuvant can be any adjuvant as discussed below. In certain embodiments, an adjuvant is formulated with the linear polyribonucleotide as a part of an immunogenic composition. In certain embodiments, an adjuvant is not part of an immunogenic composition comprising the linear polyribonucleotide. In certain embodiments, an adjuvant is administered separately from an immunogenic composition comprising the linear polyribonucleotide. In this aspect, the adjuvant is co-administered (e.g., administered simultaneously) or administered at a different time than an immunogenic composition comprising the linear polyribonucleotide to the subject. For example, the adjuvant is administered 1 minute, 5 minutes, 10 minutes, 15 minutes, 30 minutes, 45 minutes, 60 minutes, 90 minutes, 2 hours, 3 hours, 4 hours, 5 hours, 6 hours, 7 hours, 8 hours, 9 hours, 10 hours, 12 hours, 14 hours, 16 hours, 18 hours, 20 hours, 22 hours, or 24 hours, or any minute or hour therebetween, after an immunogenic composition comprising the linear polyribonucleotide. In some embodiments, the adjuvant is administered 1 minute, 5 minutes, 10 minutes, 15 minutes, 30 minutes, 45 minutes, 60 minutes, 90 minutes, 2 hours, 3 hours, 4 hours, 5 hours, 6 hours, 7 hours, 8 hours, 9 hours, 10 hours, 12 hours, 14 hours, 16 hours, 18 hours, 20 hours, 22 hours, or 24 hours, or any minute or hour therebetween, before an immunogenic composition comprising the linear polyribonucleotide. For example, the adjuvant is administered 1, 2, 3, 4, 5, 6, 7, 14, 21, 28, 35, 42, 49, 56, 63, 70, 77, or 84 days, or any day therebetween, after an immunogenic composition comprising the linear polyribonucleotide. In some embodiments, the adjuvant is administered 1, 2, 3, 4, 5, 6, 7, 14, 21, 28, 35, 42, 49, 56, 63, 70, 77, or 84 days, or any day therebetween, before an immunogenic composition comprising the linear polyribonucleotide. The adjuvant is administered to the same anatomical location or different anatomical location as the immunogenic composition comprising the linear polyribonucleotide.

[0416] In some embodiments, a subject (e.g., a subject for immunization) is further immunized with a second agent, e.g., a vaccine (as described below) that is not a circular polyribonucleotide. The vaccine is co-administered (e.g., administered simultaneously) or administered at a different time than an immunogenic composition comprising the circular polyribonucleotide to the subject. For example, the vaccine is administered 1 minute, 5 minutes, 10 minutes, 15 minutes, 30 minutes, 45 minutes, 60 minutes, 90 minutes, 2 hours, 3 hours, 4 hours, 5 hours, 6 hours, 7 hours, 8 hours, 9 hours, 10 hours, 12 hours, 14 hours, 16 hours, 18 hours, 20 hours, 22 hours, or 24 hours, or any minute or hour therebetween, after an immunogenic composition comprising the circular polyribonucleotide. In some embodiments, the vaccine is administered 1 minute, 5 minutes, 10 minutes, 15 minutes, 30 minutes, 45 minutes, 60 minutes, 90 minutes, 2 hours, 3 hours, 4 hours, 5 hours, 6 hours, 7 hours, 8 hours, 9 hours, 10 hours, 12 hours, 14 hours, 16 hours, 18 hours, 20 hours, 22 hours, or 24 hours, or any minute or hour therebetween, before an immunogenic composition comprising the circular polyribonucleotide. For example, the vaccine is administered 1, 2, 3, 4, 5, 6, 7, 14, 21, 28, 35, 42, 49, 56, 63, 70, 77, or 84 days, or any day therebetween, after an immunogenic composition comprising the circular polyribonucleotide. In some embodiments, the vaccine is administered 1, 2, 3, 4, 5, 6, 7, 14, 21, 28, 35, 42, 49, 56, 63, 70, 77, or 84 days, or any day therebetween, before an immunogenic composition comprising the circular polyribonucleotide.

[0417] In some embodiments, a subject (e.g., a subject for immunization) is further immunized with a second agent, e.g., a vaccine (as described below) that is not a linear polyribonucleotide. The vaccine is co-administered (e.g., administered simultaneously) or administered at a different time than an immunogenic composition comprising the linear polyribonucleotide to the subject. For example, the vaccine is administered 1 minute, 5 minutes, 10 minutes, 15 minutes, 30 minutes, 45 minutes, 60 minutes, 90 minutes, 2 hours, 3 hours, 4 hours, 5 hours, 6 hours, 7 hours, 8 hours, 9 hours, 10 hours, 12 hours, 14 hours, 16 hours, 18 hours, 20 hours, 22 hours, or 24 hours, or any minute or hour therebetween, after an immunogenic composition comprising the linear polyribonucleotide. In some embodiments, the vaccine is administered 1 minute, 5 minutes, 10 minutes, 15 minutes, 30 minutes, 45 minutes, 60 minutes, 90 minutes, 2 hours, 3 hours, 4 hours, 5 hours, 6 hours, 7 hours, 8 hours, 9 hours, 10 hours, 12 hours, 14 hours, 16 hours, 18 hours, 20 hours, 22 hours, or 24 hours, or any minute or hour therebetween, before an immunogenic composition comprising the linear polyribonucleotide. For example, the vaccine is administered 1, 2, 3, 4, 5, 6, 7, 14, 21, 28, 35, 42, 49, 56, 63, 70, 77, or 84 days, or any day therebetween, after an immunogenic composition comprising the linear polyribonucleotide. In some embodiments, the vaccine is administered 1, 2, 3, 4, 5, 6, 7, 14, 21, 28, 35, 42, 49, 56, 63, 70, 77, or 84 days, or any day therebetween, before an immunogenic composition comprising the linear polyribonucleotide.

[0418] A subject (e.g., a subject for immunization) can be immunized with an immunogenic composition, adjuvant, vaccine (e.g., protein subunit vaccine), or a combination thereof any suitable number of times to achieve a desired response. For example, a prime-boost immunization strategy can be utilized to generate hyperimmune plasma containing a high concentration of antibodies that bind to immunogens and/or epitopes of the disclosure. A subject can be immunized with an immunogenic composition, adjuvant, vaccine (e.g., protein subunit vaccine), or a combination thereof, of the disclosure, for example, at least 1, at least 2, at least 3, at least 4, at least 5, at least 6, at least 7, at least 8, at least 9, at least 10, or at least 15 times, or more.

[0419] In some embodiments, a subject (e.g., a subject for immunization) can be immunized with an immunogenic composition, adjuvant, vaccine (e.g., protein subunit vaccine), or a combination thereof, of the disclosure at most 2, at most 3, at most 4, at most 5, at most 6, at most 7, at most 8, at most 9, at most 10, at most 15, or at most 20 times, or less.

[0420] In some embodiments, a subject (e.g., a subject for immunization) can be immunized with an immunogenic composition, adjuvant, vaccine (e.g., protein subunit vaccine), or a combination thereof, of the disclosure about 1, 2, 3, 4, 5, 6, 7, 8, 9, 10, 15, or 20 times.

[0421] In some embodiments, a subject (e.g., a subject for immunization) can be immunized with an immunogenic composition, adjuvant, vaccine (e.g., protein subunit vaccine), or a combination thereof, of the disclosure once. In some embodiments, a subject can be immunized with an immunogenic composition, adjuvant, vaccine (e.g., protein subunit vaccine), or a combination thereof, of the disclosure twice. In some embodiments, a subject can be immunized with an immunogenic composition, adjuvant, vaccine (e.g., protein subunit vaccine), or a combination thereof, of the disclosure three times. In some embodiments, a subject can be immunized with an immunogenic composition, adjuvant, vaccine (e.g., protein subunit vaccine), or a combination thereof, of the disclosure four times. In some embodiments, a subject can be immunized with an immunogenic composition, adjuvant, vaccine (e.g., protein subunit vaccine), or a combination thereof, of the disclosure five times. In some embodiments, a subject can be immunized with an immunogenic composition, adjuvant, vaccine (e.g., protein subunit vaccine), or a combination thereof, of the disclosure seven times.

[0422] Suitable time intervals can be selected for spacing two or more immunizations. The time intervals can apply to multiple immunizations with the same immunogenic composition, adjuvant, or vaccine (e.g., protein subunit vaccine), or combination thereof, for example, the same the same immunogenic composition, adjuvant, or vaccine (e.g., protein subunit vaccine), or combination thereof, can be administered in the same amount or a different amount, via the same immunization route or a different immunization route. The time intervals can apply to immunizations with different agents, for example, a first immunogenic composition comprising a first circular polyribonucleotide and a second immunogenic composition comprising s second circular polyribonucleotide. The time intervals can apply to a first immunogenic composition comprising a first linear polyribonucleotide and a second immunogenic composition comprising s second linear polyribonucleotide. For regimens comprising three or more immunizations, the time intervals between immunizations can be the same or different. In some examples, about 1, 2, 3, 4, 5, 6, 7, 8, 9, 10, 11, 12, 14, 16, 17, 18, 20, 22, 24, 26, 28, 30, 32, 34, 36-, 40-, 48-, or 72-hours elapse between two immunizations. In some embodiments, about 1, 2, 3, 4, 5, 6, 7, 8, 9, 10, 11, 12, 14, 16, 17, 18, 20, 21-, 24-, 28-, or 30-days elapse between two immunizations. In some embodiments, about 1, 2, 3, 4, 5-, 6-, 7-, or 8-weeks elapse between two immunizations. In some embodiments, about 1, 2, 3, 4, 5-, 6-, 7-, or 8-months elapse between two immunizations.

[0423] In some embodiments, at least 1, at least 2, at least 3, at least 4, at least 5, at least 6, at least 7, at least 8, at least 9, at least 10, at least 15, at least 20, at least 24, at least 36, or at least 72 hours, or more elapse between two immunizations. In some embodiments, at most 1, at most 2, at most 3, at most 4, at most 5, at most 6, at most 7, at most 8, at most 9, at most 10, at most 15, at most 20, at most 24, at most 36, or at most 72 hours, or less elapse between two immunizations.

[0424] In some embodiments, at least 1, at least 2, at least 3, at least 4, at least 5, at least 6, at least 7, at least 8, at least 9, at least 10, at least 15, at least 20, at least 21, at least 22, at least 23, at least 24, at least 25, at least 26 at least 27, at least 28, at least 29, or at least 30 days, or more, elapse between two immunizations. In some embodiments, at most 2, at most 3, at most 4, at most 5, at most 6, at most 7, at most 8, at most 9, at most 10, at most 15, at most 20, at most 21, at most 22, at most 23, at most 24, at most 25, at most 26, at most 27, at most 28, at most 29, at most 30, at most 32, at most 34, or at most 36 days, or less elapse between two immunizations.

[0425] In some embodiments, at least 1, at least 2, at least 3, at least 4, at least 5, at least 6, at least 7, or at least 8 weeks, or more elapse between two immunizations. In some embodiments, at most 2, at most 3, at most 4, at most 5, at most 6, at most 7, at most 8 weeks, or less elapse between two immunizations.

[0426] In some embodiments, at least 1, at least 2, at least 3, at least 4, at least 5, at least 6, at least 7, or at least 8 months, or more elapse between two immunizations. In some embodiments, at most 2, at most 3, at most 4, at most 5, at most 6, at most 7, at most 8 months, or less elapse between two immunizations.

[0427] In some embodiments, a non-human animal having a humanized immune system is immunized 3 times at 3-4-week intervals.

[0428] In some embodiments, the method further comprises pre-administering an agent to improve immunogenic responses to the non-human animal (e.g., the non-human animal having a humanized immune system) or human subject (e.g., a non-human animal or human subject for immunization). In some embodiments, the agent is the immunogen as disclosed herein (e.g., a protein immunogen). For example, the method comprises administering the protein immunogen from 1 to 7 days prior to administration of the circular polyribonucleotide comprising the sequence encoding the protein immunogen. In some embodiments, the protein immunogen is administered 1, 2, 3, 4, 5, 6, or 7 days prior to administration of the circular polyribonucleotide comprising the sequence encoding the protein immunogen. For example, the method comprises administering the protein immunogen from 1 to 7 days prior to administration of the linear polyribonucleotide comprising the sequence encoding the protein immunogen. In some embodiments, the protein immunogen is administered 1, 2, 3, 4, 5, 6, or 7 days prior to administration of the linear polyribonucleotide comprising the sequence encoding the protein immunogen. The protein immunogen may be administered as a protein preparation, encoded in a plasmid (pDNA), presented in a virus-like particle (VLP), formulated in a lipid nanoparticle, or the like.

[0429] A subject (e.g., a subject for immunization) can be immunized with an immunogenic composition, an adjuvant, or a vaccine (e.g., protein subunit vaccine), or a combination thereof, at any suitable number anatomical sites. The same immunogenic composition, an adjuvant, a vaccine (e.g., protein subunit vaccine), or a combination thereof can be administered to multiple anatomical sites, different immunogenic compositions comprising the same or different circular polyribonucleotides, adjuvants, vaccines (e.g., protein subunit vaccine) or a combination thereof can be administered to different anatomical sites, different immunogenic compositions comprising the same or different circular polyribonucleotides, adjuvants, vaccines (e.g., protein subunit vaccines) or a combination thereof can be administered to the same anatomical site, or any combination thereof. For example, an immunogenic composition comprising a circular polyribonucleotide can be administered in to two different anatomical sites, and/or an immunogenic composition comprising a circular polyribonucleotide can be administered to one anatomical site, and an adjuvant can be administered to a different anatomical site. The same immunogenic composition, an adjuvant, a vaccine (e.g., protein subunit vaccine), or a combination thereof can be administered to multiple anatomical sites, different immunogenic compositions comprising the same or different linear polyribonucleotides, adjuvants, vaccines (e.g., protein subunit vaccine) or a combination thereof can be administered to different anatomical sites, different immunogenic compositions comprising the same or different linear polyribonucleotides, adjuvants, vaccines (e.g., protein subunit vaccines) or a combination thereof can be administered to the same anatomical site, or any combination thereof. For example, an immunogenic composition comprising a linear polyribonucleotide can be administered in to two different anatomical sites, and/or an immunogenic composition comprising a linear polyribonucleotide can be administered to one anatomical site, and an adjuvant can be administered to a different anatomical site.

[0430] Immunization at any two or more anatomical routes can be via the same route of immunization (e.g., intramuscular) or by two or more routes of immunization. In some embodiments, an immunogenic composition comprising a circular polyribonucleotide, an adjuvant, or a vaccine (e.g., protein subunit vaccine), or a combination thereof, of the disclosure is immunized to at least 1, at least 2, at least 3, at least 4, at least 5, or at least 6 anatomical sites of a subject (e.g., a subject for immunization). In some embodiments, an immunogenic composition comprising a circular polyribonucleotide, an adjuvant, or a vaccine (e.g., protein subunit vaccine), or a combination thereof, of the disclosure is immunized to at most 2, at most 3, at most 4, at most 5, at most 6, at most 7, at most 8, at most 9, or at most 10 anatomical sites of the subject, or less. In some embodiments, an immunogenic composition comprising a circular polyribonucleotide, or an adjuvant of the disclosure is immunized to 1, 2, 3, 4, 5, 6, 7, 8, 9, 10 anatomical sites of a subject. In some embodiments, an immunogenic composition comprising a linear polyribonucleotide, an adjuvant, or a vaccine (e.g., protein subunit vaccine), or a combination thereof, of the disclosure is immunized to at least 1, at least 2, at least 3, at least 4, at least 5, or at least 6 anatomical sites of a subject. In some embodiments, an immunogenic composition comprising a linear polyribonucleotide, an adjuvant, or a vaccine (e.g., protein subunit vaccine), or a combination thereof, of the disclosure is immunized to at most 2, at most 3, at most 4, at most 5, at most 6, at most 7, at most 8, at most 9, or at most 10 anatomical sites of the subject, or less. In some embodiments, an immunogenic composition comprising a linear polyribonucleotide, or an adjuvant of the disclosure is immunized to 1, 2, 3, 4, 5, 6, 7, 8, 9, 10 anatomical sites of a subject.

[0431] Immunization can be by any suitable route. Non-limiting examples of immunization routes include intravenous, intramuscular, intraarterial, intrathecal, intracapsular, intraorbital, intracardiac, intradermal, intraperitoneal, transtracheal, subcutaneous, subcuticular, intraarticular, subcapsular, subarachnoid, intraspinal, epidural, intrasternal, intracerebral, intraocular, intralesional, intracerebroventricular, intracisternal, or intraparenchymal, e.g., injection and infusion. In some cases, immunization can be via inhalation. Two or more immunizations can be done by the same route or by different routes.

[0432] Any suitable amount of a circular polyribonucleotide can be administered to a subject (e.g., a subject for immunization) of the disclosure. For example, a subject can be immunized with at least about 1 ng, at least about 10 ng, at least about 100 ng, at least about 1 μg, at least about 10 μg, at least about, at least about 100 μg, at least about 1 mg, at least about 10 mg, at least about 100 mg, or at least about 1 g of a circular polyribonucleotide. In some embodiments, a subject can be immunized with at most about 1 ng, at most about 10 ng, at most about 100 ng, at most about 1 μg, at most about 10 μg, at most about, at most about 100 μg, at most about 1 mg, at most about 10 mg, at most about 100 mg, or at most about 1 g of a circular polyribonucleotide. In some embodiments, a subject can be immunized with about 1 ng, about 10 ng, about 100 ng, about 1 μg, about 10 μg, about, about 100 μg, about 1 mg, about 10 mg, about 100 mg, or about 1 g of a circular polyribonucleotide.

[0433] Any suitable amount of a linear polyribonucleotide can be administered to a subject (e.g., a subject for immunization) of the disclosure. For example, a subject can be immunized with at least about 1 ng, at least about 10 ng, at least about 100 ng, at least about 1 μg, at least about 10 μg, at least about 100 μg, at least about 1 mg, at least about 10 mg, at least about 100 mg, or at least about 1 g of a linear polyribonucleotide. In some embodiments, a subject can be immunized with at most about 1 ng, at most about 10 ng, at most about 100 ng, at most about 1 μg, at most about 10 μg, at most about, at most about 100 μg, at most about 1 mg, at most about 10 mg, at most about 100 mg, or at most about 1 g of a linear polyribonucleotide. In some embodiments, a subject can be immunized with about 1 ng, about 10 ng, about 100 ng, about 1 μg, about 10 μg, about, about 100 μg, about 1 mg, about 10 mg, about 100 mg, or about 1 g of a linear polyribonucleotide.

[0434] In some embodiments, the method further comprises evaluating the non-human animal or human subject (e.g., a subject for immunization) for antibody response to the immunogen. In some embodiments, the evaluating is before and/or after administration of the circular polyribonucleotide comprising a sequence encoding a coronavirus immunogen. In some embodiments, the evaluating is before and/or after administration of the linear polyribonucleotide comprising a sequence encoding a coronavirus immunogen.

### Adjuvants

[0435] An adjuvant enhances the immune responses (humoral and/or cellular) elicited in a subject (e.g., a subject for immunization) who receives the adjuvant and/or an immunogenic composition comprising the adjuvant. In some embodiments, an adjuvant is administered to a subject (e.g., a subject for immunization) for the production of polyclonal antibodies from a circular polyribonucleotide as disclosed herein. In some embodiments, an adjuvant is administered to a subject for the production of polyclonal antibodies from a linear polyribonucleotide as disclosed herein. In some embodiments, an adjuvant is used in the methods described herein to produce polyclonal antibodies as described herein. In a particular embodiment, an adjuvant is used to promote production of the polyclonal antibodies in a subject against a coronavirus immunogen and/or epitope expressed from a circular polyribonucleotide. In some embodiments, an adjuvant and circular polyribonucleotide are co-administered in separate compositions. In some embodiments, an adjuvant is mixed or formulated with a circular polyribonucleotide in a single composition to obtain an immunogenic composition that is administered to a subject. In a particular embodiment, an adjuvant is used to promote production of the polyclonal antibodies in a subject against a coronavirus immunogen and/or epitope expressed from a linear polyribonucleotide. In some embodiments, an adjuvant and linear polyribonucleotide are co-administered in separate compositions. In some embodiments, an adjuvant is mixed or formulated with a linear polyribonucleotide in a single composition to obtain an immunogenic composition that is administered to a subject.

[0436] An adjuvant may be a component of a polyribonucleotide. An adjuvant may be a polypeptide adjuvant encoded by an expression sequence of a polyribonucleotide, may be a molecule (e.g., a small molecule, polypeptide, or nucleic acid molecule) that is not encoded by the polyribonucleotide. An adjuvant may be formulated with a polyribonucleotide in the same pharmaceutical composition. An adjuvant may be administered separately (e.g., as a separate pharmaceutical composition) in combination with a polyribonucleotide.

[0437] In some embodiments, the adjuvant is encoded by the polyribonucleotide. In some embodiments, the polyribonucleotide encodes more than one adjuvant. For example, the polyribonucleotide encodes between 2 and 100 adjuvants. In some embodiments, the polyribonucleotide encodes between 2 and 10 adjuvants. In some embodiments, the polyribonucleotide encodes 2 adjuvants. One or more of the adjuvants encoded by a polyribonucleotide may include an N-terminal signal sequence, e.g., that directs the expressed polypeptide adjuvant to the secretory pathway. In some embodiments, the polyribonucleotide encodes 3 adjuvants. In some embodiments, the polyribonucleotide encodes 4 adjuvants. In some embodiments, the polyribonucleotide encodes 5 adjuvants. In some embodiments, the adjuvant is encoded by the same polyribonucleotide that encodes one or more immunogens. The adjuvant(s) and immunogen(s) may be co-delivered on the same polyribonucleotide. In some embodiments, the adjuvant encoded by the polyribonucleotide is a sequence (e.g., a polyribonucleotide sequence) that is an innate immune system stimulator. The innate immune system stimulator sequence may include at least 5, at least 10, at least 20, at least 50, at least 100, or at least 500 ribonucleotides. The innate immune system stimulator sequence may include between 5 and 1000, between 10 and 500, between 20 and 500, between 10 and 100, between 20 and 100, between 20 and 50, between 100 and 500, between 500 and 1000, or between 10 and 1000 ribonucleotides. For example, a sequence that is an innate immune system stimulator may be selected from a GU-rich motif, an AU-rich motif, a structured region including dsRNA, or an aptamer.

[0438] Adjuvants may be a TH1 adjuvant and/or a TH2 adjuvant. Further adjuvants contemplated by this disclosure include, but are not limited to, one or more of the following:

[0439] Mineral-containing compositions. Mineral-containing compositions suitable for use as adjuvants in the disclosure include mineral salts, such as aluminum salts, and calcium salts. The disclosure includes mineral salts such as hydroxides (e.g., oxyhydroxides), phosphates (e.g., hydroxyphosphates, orthophosphates), sulphates, etc., or mixtures of different mineral compounds, with the compounds taking any suitable form (e.g., gel, crystalline, amorphous, etc.). Calcium salts include calcium phosphate (e.g., the “CAP”). Aluminum salts include hydroxides, phosphates, sulfates, and the like.

[0440] Oil emulsion compositions. Oil-emulsion compositions suitable for use as adjuvants in the disclosure include squalene-water emulsions, such as MF59 (5% Squalene, 0.5% Tween 80 and 0.5% Span, formulated into submicron particles using a microfluidizer), AS03 (α-tocopherol, squalene and polysorbate 80 in an oil-in-water emulsion), Montanide formulations (e.g., Montanide ISA 51, Montanide ISA 720), incomplete Freunds adjuvant (IFA), complete Freund's adjuvant (CFA), and incomplete Freund's adjuvant (IFA).

[0441] Small molecules. Small molecules suitable for use as adjuvants in the disclosure include imiquimod or 847, resiquimod or R848, and gardiquimod.

[0442] Polymeric nanoparticles. Polymeric nanoparticles suitable for use as an adjuvant in the disclosure include poly(α-hydroxy acids), polyhydroxy butyric acids, polylactones (including polycaprolactones), polydioxanones, polyvalerolactone, polyorthoesters, polyanhydrides, polycyanoacrylates, tyrosine-derived polycarbonates, polyvinyl-pyrrolidinones or polyester-amides, and combinations thereof.

[0443] Saponin (i.e., a glycoside, polycyclic aglycones attached to one or more sugar side chains). Saponin formulations suitable for use as an adjuvant in the disclosure include purified formulations, such as QS21, as well as lipid formulations, such as ISCOMs and ISCOMs matrix. QS21 is marketed as STIMULON™. Saponin formulations may also include a sterol, such as cholesterol. Combinations of saponins and cholesterols can be used to form unique particles called immune-stimulating complexes (ISCOMs). ISCOMs typically also include a phospholipid such as phosphatidylethanolamine or phosphatidylcholine. Any known saponin can be used in ISCOMs. Preferably, the ISCOM includes one or more of QuilA, QHA & QHC. Optionally, the ISCOMS may be devoid of additional detergent.

[0444] Lipopolysaccharides. Adjuvants suitable for use in the disclosure include non-toxic derivatives of enterobacterial lipopolysaccharide (LPS). Such derivatives include monophosphoryl lipid A (MPLA), glucopyranosyl lipid A (GLA) and 3-O-deacylated MPL (3dMPL). 3dMPL is a mixture of 3 De-O-acylated monophosphoryl lipid A with 4, 5 or 6 acylated chains. Other non-toxic LPS derivatives include monophosphoryl lipid A mimics, such as aminoalkyl glucosaminide phosphate derivatives e.g., RC-529.

[0445] Liposomes. Liposomes suitable for use as an adjuvant in the disclosure include virosomes and CAF01.

[0446] Lipid nanoparticles. Adjuvants suitable for use in the disclosure include lipid nanoparticles (LNPs) and their components.

[0447] Lipopeptides (i.e., compounds including one or more fatty acid residues and two or more amino acid residues). Lipopeptide suitable for use as an adjuvant in the disclosure include Pam2 (Pam2CSK4) and Pam3 (Pam3CSK4).

[0448] Glycolipids. Glycolipids suitable for use as an adjuvant in the disclosure include cord factor (trehalose dimycolate).

[0449] Peptides and peptidoglycans derived from (synthetic or purified) gram-negative or gram-positive bacteria, such as MDP (N-acetyl-muramyl-L-alanyl-D-isoglutamine) are suitable for use as an adjuvant in the disclosure Carbohydrates (carbohydrate containing) or polysaccharides suitable for use as an adjuvant include dextran (e.g., branched microbial polysaccharide), dextran-sulfate, lentinan, zymosan, beta-glucan, deltin, mannan, and chitin.

[0450] RNA based adjuvants. RNA based adjuvants suitable for use in the disclosure are poly IC, poly IC:LC, hairpin RNAs with or without a 5′triphosphate, viral sequences, polyU containing sequence, dsRNA natural or synthetic RNA sequences (e.g., poly I:C), and nucleic acid analogs (e.g., cyclic GMP-AMP or other cyclic dinucleotides e.g., cyclic di-GMP, immunostimulatory base analogs e.g., C8-substituted and N7,C8-disubstituted guanine ribonucleotides). In some embodiments, the adjuvant is the linear polyribonucleotide counterpart of the circular polyribonucleotide described herein.

[0451] DNA based adjuvants. DNA based adjuvants suitable for use in the disclosure include CpGs (e.g., CpG1018), dsDNA, and natural or synthetic immunostimulatory DNA sequences.

[0452] Proteins or peptides. Proteins and peptides suitable for use as an adjuvant in the disclosure include flagellin-fusion proteins, MBL (mannose-binding lectin), cytokines, and chemokines.

[0453] Viral particles. Viral particles suitable for use as an adjuvant include virosomes (phospholipid cell membrane bilayer).

[0454] An adjuvant for use in the disclosure may be bacterial derived, such as a flagellin, LPS, or a bacterial toxin (e.g., enterotoxins (protein), e.g., heat-labile toxin or cholera toxin). An adjuvant for use in the disclosure may be a hybrid molecule such as CpG conjugated to imiquimod. An adjuvant for use in the disclosure may be a fungal or oomycete microbe-associated molecular patterns (MAMPs), such as chitin or beta-glucan. In some embodiments, an adjuvant is an inorganic nanoparticle, such as gold nanorods or silica-based nanoparticles (e.g., mesoporous silica nanoparticles (MSN)). In some embodiments, an adjuvant is a multi-component adjuvant or adjuvant system, such as AS01 (AS01B), ASO3, ASO4 (MLP5+alum), alum (mixture of aluminum hydroxide and magnesium hydroxide), aluminum hydroxide, magnesium hydroxide, CFA (complete Freund's adjuvant: IFA+peptiglycan+trehalose dimycolate), CAF01 (two component system of cationic liposome vehicle (dimethyl dioctadecyl-ammonium (DDA)) stabilized with a glycolipid immunomodulator (trehalose 6,6-dibehenate (TDB), which can be a synthetic variant of cord factor located in the mycobacterial cell wall).

[0455] Cytokines. An adjuvant may be a partial or full-length DNA encoding a cytokine such as, a pro-inflammatory cytokine (e.g., GM-CSF, IL-1 alpha, IL-1 beta, TGF-beta, TNF-alpha, TNF-beta), Th-1 inducing cytokines (e.g., IFN-gamma, IL-2, IL-12, IL-15, IL-18), or Th-2 inducing cytokines (e.g., IL-4, IL-5, IL-6, IL-10, IL-13).

[0456] Chemokines. An adjuvant may be a partial or full-length DNA or RNA (e.g., circular polyribonucleotide or mRNA) encoding a chemokine such as, MCP-1, MIP-1 alpha, MIP-1 beta, Rantes, or TCA-3.

[0457] An adjuvant may be a partial or full-length DNA encoding a costimulatory molecule, such as CD80, CD86, CD40-L, CD70, or CD27.

[0458] An adjuvant may be a partial or full length DNA or RNA (e.g., circular polyribonucleotide or mRNA) encoding for an innate immune system stimulator (partial, full-length, or mutated) such as TLR4, TLR3, TLR3, TLR9, TLR7, TLR8, TLR7, RIG-I/DDX58, or MDA-5/IFIH1; or a constitutively active (ca) innate immune stimulator, such as caTLR4, caTLR3, caTLR3, caTLR9, caTLR7, caTLR8, caTLR7, caRIG-I/DDX58, or caMDA-5/IFIH1.

[0459] An adjuvant may be a partial or full-length DNA or RNA (e.g., circular polyribonucleotide or mRNA) encoding for an adaptor or signaling molecule, such as STING (e.g., caSTING), TRIF, TRAM, MyD88, IPS1, ASC, MAVS, MAPKs, IKK-alpha, IKK complex, TBK1, beta-catenin, and caspase 1.

[0460] An adjuvant may be a partial or full-length DNA or RNA (e.g., circular polyribonucleotide or mRNA) encoding for a transcriptional activator, such as a transcription activator that can upregulate an immune response (e.g., AP1, NF-kappa B, IRF3, IRF7, IRF1, or IRF5). An adjuvant may be a partial or full-length DNA encoding for a cytokine receptor, such as IL-2beta, IFN-gamma, or IL-6.

[0461] An adjuvant may be a partial or full-length DNA or RNA (e.g., circular polyribonucleotide or mRNA) encoding for a bacterial component, such as flagellin or MBL.

[0462] An adjuvant may be a partial or full-length DNA or RNA (e.g., circular polyribonucleotide or mRNA) encoding for any component of the innate immune system.

[0463] In some embodiments, a subject is administered a polyribonucleotide encoding one or more immunogens in combination with an adjuvant (e.g., an adjuvant that is a separate molecular entity from the polyribonucleotide or an adjuvant that is encoded on a separate polyribonucleotide). The term “in combination with” as used throughout the description includes any two compositions administered as part of a therapeutic regimen. This may include, for example, a polyribonucleotide and an adjuvant formulated as a single pharmaceutical composition. This also includes, for example, a polyribonucleotide and an adjuvant administered to a subject as separate compositions according to a defined therapeutic or dosing regimen. An adjuvant may be administered to a subject before, at substantially the same time, or after the administration of a polyribonucleotide. An adjuvant may be administered within 1 day, 2 days, 5 days, 10 days, 20 days, 1 month, 2 months, 3 months, 4 months, 5 months, or 6 months before or after administration of a polyribonucleotide. An adjuvant may be administered by the same route of administration (e.g., intradermal, intramuscularly, subcutaneously, intravenously, intraperitoneally, topically, or orally) or a different route than a polyribonucleotide.

### Vaccine

[0464] In some embodiments of methods described herein, a second agent is also administered to the subject (e.g., a subject for immunization), e.g., a second vaccine is also administered to a subject (e.g., a subject for immunization). In some embodiments, a composition that is administered to a subject comprises a polyribonucleotide described herein and a second vaccine. In some embodiments, a vaccine and polyribonucleotide are co-administered in separate compositions. The vaccine is simultaneously administered with the polyribonucleotide immunization, administered before the polyribonucleotide immunization, or after the polyribonucleotide immunization.

[0465] For example, in some embodiments, a subject (e.g., a subject for immunization) is immunized with a non-polyribonucleotide coronavirus vaccine (e.g., protein subunit vaccine) and an immunogenic composition comprising a polyribonucleotide. In some embodiments, a subject is immunized with a non-polyribonucleotide vaccine for a first microorganism (e.g., pneumococcus) and an immunogenic composition comprising a polyribonucleotide as disclosed herein. A vaccine can be any bacterial infection vaccine or viral infection vaccine. In a particular embodiment, a vaccine is a pneumococcal polysaccharide vaccine, such as PCV13 or PPSV23. In some embodiments, the vaccine is an influenza vaccine. In some embodiments, the vaccine is an RSV vaccine (e.g., palivizumap).

[0466] In some embodiments, a composition that is administered to a subject comprises a linear polyribonucleotide and a vaccine. In some embodiments, a vaccine and linear polyribonucleotide are co-administered in separate compositions. The vaccine is simultaneously administered with the linear polyribonucleotide immunization, administered before the linear polyribonucleotide immunization, or after the linear polyribonucleotide immunization.

[0467] For example, in some embodiments, a subject (e.g., a subject for immunization) is immunized with a polyribonucleotide (e.g., non-linear polyribonucleotide) coronavirus vaccine (e.g., protein subunit vaccine) and an immunogenic composition comprising a linear polyribonucleotide as disclosed herein comprising a sequence encoding a coronavirus immunogen. In some embodiments, a subject is immunized with a non-polyribonucleotide vaccine for a first microorganism (e.g., pneumococcus) and an immunogenic composition comprising a linear polyribonucleotide as disclosed herein comprising a sequence encoding a coronavirus immunogen. A vaccine can be any bacterial infection vaccine or viral infection vaccine. In a particular embodiment, a vaccine is a pneumococcal polysaccharide vaccine, such as PCV13 or PPSV23. In some embodiments, the vaccine is an influenza vaccine. In some embodiments, the vaccine is an RSV vaccine (e.g., palivizumap).

### Production and Purification of Antibodies

[0468] Immunization of a subject with a polyribonucleotide described herein (e.g., a polyribonucleotide encoding a coronavirus immunogen) may induce the production of antibodies in the subject that bind to the immunogen expressed from the circular polyribonucleotide (e.g., produce anti-coronavirus antibodies). In some embodiments, immunization is for the purpose of producing antibodies in the subject (e.g., a human or a non-human animal) which are quantified or purified from the subject (e.g., for diagnostic or therapeutic use). Thereby, circular polyribonucleotides of the present invention may be used in methods of producing polyclonal or monoclonal antibodies (e.g., polyclonal or monoclonal anti-coronavirus antibodies).

[0469] For example, the disclosure provides administering a circular polyribonucleotide described herein (e.g., encoding a coronavirus immunogen) to a non-human animal (e.g., a non-human mammal, such as a goat, pig, rabbit, rat, mouse, llama, camel, horse, donkey, or bovine (cow)). The circular polyribonucleotide may be administered according to any composition, formulation, route or administration, amount, or dosing regimen described herein (e.g., optionally with an adjuvant, administered in the same composition or as part of a dosing regimen). In some embodiments, the non-human animal has a humanized immune system (e.g., a bovine having a humanized immune system).

[0470] Plasma including polyclonal antibodies produced from immunogenic compositions including circular polyribonucleotides as disclosed herein can be collected from a subject that was immunized with the circular polyribonucleotide. These polyclonal antibodies can be quantified (e.g., for diagnostic purposes in a human subject) or purified (e.g., for use in a method of treatment or for the development of monoclonal antibodies). Plasma can be collected by methods known to those of skill in the art, e.g., via plasmapheresis. Plasma can be collected from the same subject once or multiple times, for example, multiple times over a given period of time after an immunization, multiple times after an immunization, multiple times in between immunizations, or any combination thereof.

[0471] Antibodies, or fragments thereof, (e.g., polyclonal antibodies, such as human or humanized polyclonal antibodies) that bind specifically to a coronavirus immunogen (e.g., a coronavirus immunogen described herein) may be produced by the methods described herein. Antibodies, or fragments thereof, may be purified from blood (e.g., from blood plasma or blood serum) by methods known to those of skill in the art.

[0472] Polyclonal antibodies may be purified from plasma using techniques well known to those of skill in the art. For example, plasma is pH-adjusted to 4.8 (e.g., with dropwise addition of 20% acetic acid), fractionated by caprylic acid at a caprylic acid/total protein ratio of 1.0, and then clarified by centrifugation (e.g., at 10,000 g for 20 min at room temperature). The supernatant containing polyclonal antibodies (e.g., IgG polyclonal antibodies) is neutralized to pH 7.5 with 1 M tris, 0.22 μM filtered, and affinity-purified with an anti-human immunoglobulin-specific column (e.g., anti-human IgG light chain-specific column). The polyclonal antibodies are further purified by passage over an affinity column that specifically binds impurities, for example, non-human antibodies from the non-human animal. The polyclonal antibodies are stored in a suitable buffer, for example, a sterile-filtered buffer consisting of 10 mM glutamic acid monosodium salt, 262 mM D-sorbitol, and Tween (0.05 mg/ml) (pH 5.5). The quantity and concentration of the purified polyclonal antibodies are determined. HPLC size exclusion chromatography is conducted to determine whether aggregates or multimers are present. In some embodiments, the human polyclonal antibodies are purified from a non-human animal having a humanized immune system according to Beigel, J H et al. (Lancet Infect. Dis., 18:410-418 (2018), including Supplementary appendix), which is herein incorporated by reference in its entirety.

[0473] The disclosure also provides methods of producing antibodies in a human subject, e.g., for therapeutic treatment and/or diagnosis. For example, the disclosure provides a method of quantifying a level of anti-coronavirus antibodies in a subject following administration of a circular polyribonucleotide or immunogenic composition described herein. Quantification may be performed by methods known in the art (e.g., performing an antibody titer), for example by obtaining a blood sample from the subject and quantifying the anti-coronavirus antibody level using standard techniques, such as an enzyme-linked immunoassay (ELISA). Antibodies may also be purified by methods known to those of skill in the art.

### Pharmaceutical Compositions

[0474] In some embodiments, the immunogenic compositions administered to a subject (e.g., a subject for immunization) is a pharmaceutical composition. The pharmaceutical compositions as contemplated by the current invention may also include a pharmaceutically acceptable excipient.

[0475] The disclosure also provides pharmaceutical compositions comprising a plurality of polyclonal antibodies or a polyclonal antibody preparation against coronavirus disclosed herein and a pharmaceutically acceptable excipient.

[0476] A pharmaceutically acceptable excipient can be a non-carrier excipient. A non-carrier excipient serves as a vehicle or medium for a composition, such as a circular polyribonucleotide as described herein. A non-carrier excipient serves as a vehicle or medium for a composition, such as a linear polyribonucleotide as described herein. Non-limiting examples of a non-carrier excipient include solvents, aqueous solvents, non-aqueous solvents, dispersion media, diluents, dispersions, suspension aids, surface active agents, isotonic agents, thickening agents, emulsifying agents, preservatives, polymers, peptides, proteins, cells, hyaluronidases, dispersing agents, granulating agents, disintegrating agents, binding agents, buffering agents (e.g., phosphate buffered saline (PBS)), lubricating agents, oils, and mixtures thereof. A non-carrier excipient can be any one of the inactive ingredients approved by the United States Food and Drug Administration (FDA) and listed in the Inactive Ingredient Database that does not exhibit a cell-penetrating effect. Pharmaceutical compositions may optionally comprise one or more additional active substances, e.g., therapeutically and/or prophylactically active substances. Pharmaceutical compositions of the present invention may be sterile and/or pyrogen-free. General considerations in the formulation and/or manufacture of pharmaceutical agents may be found, for example, in Remington: The Science and Practice of Pharmacy 21st ed., Lippincott Williams & Wilkins, 2005 (incorporated herein by reference).

[0477] A pharmaceutical composition of the disclosure can comprise polyclonal antibodies of the disclosure, a circular polyribonucleotide of the disclosure, or a combination thereof. A pharmaceutical composition of the disclosure can comprise polyclonal antibodies of the disclosure, a linear polyribonucleotide of the disclosure, or a combination thereof. A pharmaceutical composition of the disclosure can comprise polyclonal antibodies of the disclosure, a circular polyribonucleotide of the disclosure, a linear polyribonucleotide of the disclosure, or a combination thereof.

[0478] In some embodiments, pharmaceutical compositions provided herein are suitable for administration to humans. In some embodiments, pharmaceutical compositions (e.g., comprising a circular polyribonucleotide, a linear polyribonucleotide, or an immunogenic composition as described herein) provided herein are suitable for administration to a subject (e.g., a subject for immunization), wherein the subject is a human. In some embodiments, pharmaceutical compositions (e.g., comprising a plurality of polyclonal antibodies or a polyclonal antibody preparation as described herein) provided herein are suitable for administration to a subject (e.g., a subject for treatment), wherein the subject is a human.

[0479] In some embodiments, pharmaceutical compositions (e.g., comprising a circular polyribonucleotide, a linear polyribonucleotide, or an immunogenic composition as described herein) provided herein are suitable for administration to a subject (e.g., a subject for immunization), wherein the subject is a non-human animal, for example, suitable for veterinary use. Modification of pharmaceutical compositions suitable for administration to humans in order to render the compositions suitable for administration to various animals is well understood, and the ordinarily skilled veterinary pharmacologist can design and/or perform such modification with merely ordinary, if any, experimentation. Subjects to which administration of the pharmaceutical compositions is contemplated include, but are not limited to, any animals, such as humans and/or other primates; mammals, including commercially relevant mammals, e.g., pet and live-stock animals, such as cattle, pigs, horses, sheep, cats, dogs, mice, and/or rats; and/or birds, including commercially relevant birds such as parrots, poultry, chickens, ducks, geese, hens or roosters, and/or turkeys; zoo animals, e.g., a feline; non-mammal animals, e.g., reptiles, fish, amphibians, etc.

[0480] In some embodiments, pharmaceutical compositions (e.g., comprising a plurality of polyclonal antibodies or a polyclonal antibody preparation as described herein) provided herein are suitable for administration to a subject (e.g., a subject for treatment), wherein the subject is non-human animal, for example, suitable for veterinary use. Modification of pharmaceutical compositions suitable for administration to humans in order to render the compositions suitable for administration to various animals is well understood, and the ordinarily skilled veterinary pharmacologist can design and/or perform such modification with merely ordinary, if any, experimentation. Subjects to which administration of the pharmaceutical compositions is contemplated include, but are not limited to, any animals, such as humans and/or other primates; mammals, including commercially relevant mammals, e.g., pet and live-stock animals, such as cattle, pigs, horses, sheep, cats, dogs, mice, and/or rats; and/or birds, including commercially relevant birds such as parrots, poultry, chickens, ducks, geese, hens or roosters, and/or turkeys; zoo animals, e.g., a feline; non-mammal animals, e.g., reptiles, fish, amphibians, etc.

[0481] Subjects (e.g., subjects for immunization or subjects for treatment) to which administration of the pharmaceutical compositions is contemplated include any ungulates.

[0482] Formulations of the pharmaceutical compositions described herein may be prepared by any method known or hereafter developed in the art of pharmacology. In general, such preparatory methods include the step of bringing the active ingredient into association with an excipient and/or one or more other accessory ingredients, and then, if necessary and/or desirable, dividing, shaping and/or packaging the product.

[0483] In some embodiments, the reference criterion for the amount of linear polyribonucleotide molecules present in the preparation is the presence of no more than 1 ng/ml, 5 ng/ml, 10 ng/ml, 15 ng/ml, 20 ng/ml, 25 ng/ml, 30 ng/ml, 35 ng/ml, 40 ng/ml, 50 ng/ml, 60 ng/ml, 70 ng/ml, 80 ng/ml, 90 ng/ml, 100 ng/ml, 200 ng/ml, 300 ng/ml, 400 ng/ml, 500 ng/ml, 600 ng/ml, 1 μg/ml, 10 μg/ml, 50 μg/ml, 100 μg/ml, 200 g/ml, 300 μg/ml, 400 μg/ml, 500 μg/ml, 600 μg/ml, 700 μg/ml, 800 μg/ml, 900 μg/ml, 1 mg/ml, 1.5 mg/ml, or 2 mg/ml of linear polyribonucleotide molecules.

[0484] In some embodiments, the reference criterion for the amount of circular polyribonucleotide molecules present in the preparation is at least 30% (w/w), 40% (w/w), 50% (w/w), 60% (w/w), 70% (w/w), 80% (w/w), 85% (w/w), 90% (w/w), 91% (w/w), 92% (w/w), 93% (w/w), 94% (w/w), 95% (w/w), 96% (w/w), 97% (w/w), 98% (w/w), 99% (w/w), 99.1% (w/w), 99.2% (w/w), 99.3% (w/w), 99.4% (w/w), 99.5% (w/w), 99.6% (w/w), 99.7% (w/w), 99.8% (w/w), 99.9% (w/w), or 100% (w/w) molecules of the total ribonucleotide molecules in the pharmaceutical preparation.

[0485] In some embodiments, the reference criterion for the amount of linear polyribonucleotide molecules present in the preparation is no more than 0.5% (w/w), 1% (w/w), 2% (w/w), 5% (w/w), 10% (w/w), 15% (w/w), 20% (w/w), 25% (w/w), 30% (w/w), 40% (w/w), 50% (w/w) linear polyribonucleotide molecules of the total ribonucleotide molecules in the pharmaceutical preparation.

[0486] In some embodiments, the reference criterion for the amount of nicked polyribonucleotide molecules present in the preparation is no more than 0.5% (w/w), 1% (w/w), 2% (w/w), 5% (w/w), 10% (w/w), or 15% (w/w) nicked polyribonucleotide molecules of the total ribonucleotide molecules in the pharmaceutical preparation.

[0487] In some embodiments, the reference criterion for the amount of combined nicked and linear polyribonucleotide molecules present in the preparation is no more than 0.5% (w/w), 1% (w/w), 2% (w/w), 5% (w/w), 10% (w/w), 15% (w/w), 20% (w/w), 25% (w/w), 30% (w/w), 40% (w/w), 50% (w/w) combined nicked and linear polyribonucleotide molecules of the total ribonucleotide molecules in the pharmaceutical preparation. In some embodiments, a pharmaceutical preparation is an intermediate pharmaceutical preparation of a final circular polyribonucleotide drug product. In some embodiments, a pharmaceutical preparation is a drug substance or active pharmaceutical ingredient (API). In some embodiments, a pharmaceutical preparation is a drug product for administration to a subject.

[0488] In some embodiments, a preparation of circular polyribonucleotides is (before, during or after the reduction of linear RNA) further processed to substantially remove DNA, protein contamination (e.g., cell protein such as a host cell protein or protein process impurities), endotoxin, mononucleotide molecules, and/or a process-related impurity.

[0489] Pharmaceutical compositions can be sterile and stable under the conditions of manufacture and storage. The composition can be formulated as a solution, microemulsion, liposome, or other ordered structure suitable to high drug concentration. Examples of suitable aqueous and non-aqueous compositions which may be employed in the pharmaceutical compositions of the invention include water, ethanol, polyols (such as glycerol, propylene glycol, polyethylene glycol, and the like), and suitable mixtures thereof, vegetable oils, such as olive oil, and injectable organic esters, such as ethyl oleate. Proper fluidity can be maintained, for example, by the use of coating materials, such as lecithin, by the maintenance of the required particle size in the case of dispersions, and by the use of surfactants.

[0490] Sterile injectable solutions can be prepared by incorporating the active compound (e.g., an agent, such as a circular polyribonucleotide, linear polyribonucleotide, or antibody) in the required amount in an appropriate solvent with one or a combination of ingredients e.g., as enumerated above, as required, followed by sterilization microfiltration. Generally, dispersions are prepared by incorporating the active compound into a sterile vehicle that contains a basic dispersion medium and the required other ingredients e.g., from those enumerated above. In the case of sterile powders for the preparation of sterile injectable solutions, the preferred methods of preparation are vacuum drying and freeze-drying (lyophilization) that yield a powder of the active ingredient plus any additional desired ingredient from a previously sterile-filtered solution thereof.

[0491] Agents (e.g., circular polyribonucleotides, linear polyribonucleotides, or antibodies) of the disclosure can be prepared in a composition that will protect them against rapid release, such as a controlled release formulation, including implants, transdermal patches, and microencapsulated delivery systems. Biodegradable, biocompatible polymers can be used, such as ethylene vinyl acetate, polyanhydrides, polyglycolic acid, collagen, polyorthoesters, and polylactic acid. Methods for the preparation of such formulations are generally known to those skilled in the art. See, e.g., Sustained and Controlled Release Drug Delivery Systems, J. R. Robinson, ed., Marcel Dekker, Inc., New York, 1978. A composition of the disclosure can be, for example, an immediate release form or a controlled release formulation. An immediate release formulation can be formulated to allow the compounds (e.g., agents, such as a circular polyribonucleotide, linear polyribonucleotide or antibody) to act rapidly. Non-limiting examples of immediate release formulations include readily dissolvable formulations. A controlled release formulation can be a pharmaceutical formulation that has been adapted such that release rates and release profiles of the active agent can be matched to physiological and chronotherapeutic requirements or, alternatively, has been formulated to effect release of an active agent at a programmed rate. Non-limiting examples of controlled release formulations include granules, delayed release granules, hydrogels (e.g., of synthetic or natural origin), other gelling agents (e.g., gel-forming dietary fibers), matrix-based formulations (e.g., formulations comprising a polymeric material having at least one active ingredient dispersed through), granules within a matrix, polymeric mixtures, and granular masses.

[0492] Pharmaceutical formulations for administration can include aqueous solutions of the active compounds (e.g., agents, such as a circular polyribonucleotide, linear polyribonucleotide, or antibody) in water soluble form. Suspensions of the active compounds can be prepared as oily injection suspensions. Suitable lipophilic solvents or vehicles include fatty oils such as sesame oil, or synthetic fatty acid esters, such as ethyl oleate or triglycerides, or liposomes. Aqueous injection suspensions can contain substances which increase the viscosity of the suspension, such as sodium carboxymethyl cellulose, sorbitol, or dextran. The suspension can also contain suitable stabilizers or agents which increase the solubility of the agents to allow for the preparation of highly concentrated solutions. The active ingredient can be in powder form for constitution with a suitable vehicle, for example, sterile pyrogen-free water, before use.

[0493] Methods for the preparation of compositions comprising the agents described herein include formulating the agents with one or more inert, pharmaceutically acceptable excipients or carriers to form a solid, semi-solid, or liquid composition. Solid compositions include, for example, powders, dispersible granules, and cachets. Liquid compositions include, for example, solutions in which an agent is dissolved, emulsions comprising an agent, or a solution containing liposomes, micelles, or nanoparticles comprising an agent as disclosed herein. Semi-solid compositions include, for example, gels, suspensions, and creams. The compositions can be in liquid solutions or suspensions, solid forms suitable for solution or suspension in a liquid prior to use, or as emulsions. These compositions can also contain minor amounts of nontoxic, auxiliary substances, such as wetting or emulsifying agents, pH buffering agents, and other pharmaceutically acceptable additives.

[0494] Non-limiting examples of dosage forms suitable for use in the disclosure include liquid, powder, gel, nanosuspension, nanoparticle, microgel, aqueous or oily suspensions, emulsion, and any combination thereof.

[0495] In some embodiments, a formulation of the disclosure contains a thermal stabilizer, such as a sugar or sugar alcohol, for example, sucrose, sorbitol, glycerol, trehalose, or mannitol, or any combination thereof. In some embodiments, the stabilizer is a sugar. In some embodiments, the sugar is sucrose, mannitol, or trehalose.

[0496] Pharmaceutical compositions as described herein can be formulated for example to include a pharmaceutical excipient or carrier. A pharmaceutical carrier may be a membrane, lipid bilayer, and/or a polymeric carrier, e.g., a liposome or particle such as a nanoparticle, e.g., a lipid nanoparticle, and delivered by known methods, such as via partial or full encapsulation of the circular polyribonucleotide, to a subject (e.g., a subject for immunization or a subject for treatment) in need thereof (e.g., a human or non-human agricultural or domestic animal, e.g., cattle, dog, cat, horse, poultry).

### Methods of Delivery

[0497] The circular polyribonucleotide as described herein, or a pharmaceutical composition thereof as described herein can be administered to a cell in a vesicle or other membrane-based carrier as described herein. The linear polyribonucleotide as described herein, or a pharmaceutical composition thereof as described herein can be administered to a cell in a vesicle or other membrane-based carrier as described herein.

[0498] In some embodiments, the cell is a eukaryotic cell. In some embodiments, the cell is a mammalian cell. In some embodiments, the cell is an ungulate cell. In some embodiments, the cell is an animal cell. In some embodiments, the cell is an immune cell. In some embodiments, the tissue is a connective tissue, a muscle tissue, a nervous tissue, or an epithelial tissue. In some embodiments, the tissue is an organ (e.g., liver, lung, spleen, kidney, etc.). In some embodiments, the subject (e.g., a subject for immunization) is a mammal. In some embodiments, the subject (e.g., a subject for immunization) is an ungulate.

[0499] In some embodiments, a pharmaceutical formulation disclosed herein can comprise: (i) a compound (e.g., circular polyribonucleotide or antibody) disclosed herein; (ii) a buffer; (iii) a non-ionic detergent; (iv) a tonicity agent; and (v) a stabilizer. In some embodiments, a pharmaceutical formulation disclosed herein can comprise: (i) a compound (e.g., linear polyribonucleotide or antibody) disclosed herein; (ii) a buffer; (iii) a non-ionic detergent; (iv) a tonicity agent; and (v) a stabilizer. In some embodiments, the pharmaceutical formulation disclosed herein is a stable liquid pharmaceutical formulation.

### Diluents

[0500] In some embodiments, an immunogenic composition of the invention comprises a circular polyribonucleotide and a diluent. In some embodiments, an immunogenic composition of the invention comprises a linear polyribonucleotide and a diluent.

[0501] A diluent can be a non-carrier excipient. A non-carrier excipient serves as a vehicle or medium for a composition, such as a polyribonucleotide as described herein. Non-limiting examples of a non-carrier excipient include solvents, aqueous solvents, non-aqueous solvents, dispersion media, diluents, dispersions, suspension aids, surface active agents, isotonic agents, thickening agents, emulsifying agents, preservatives, polymers, peptides, proteins, cells, hyaluronidases, dispersing agents, granulating agents, disintegrating agents, binding agents, buffering agents (e.g., phosphate buffered saline (PBS)), lubricating agents, oils, and mixtures thereof. A non-carrier excipient can be any one of the inactive ingredients approved by the United States Food and Drug Administration (FDA) and listed in the Inactive Ingredient Database that does not exhibit a cell-penetrating effect. A non-carrier excipient can be any inactive ingredient suitable for administration to a non-human animal, for example, suitable for veterinary use. Modification of compositions suitable for administration to humans in order to render the compositions suitable for administration to various animals is well understood, and the ordinarily skilled veterinary pharmacologist can design and/or perform such modification with merely ordinary, if any, experimentation.

[0502] In some embodiments, the polyribonucleotide may be delivered as a naked delivery formulation, such as including a diluent. A naked delivery formulation delivers a polyribonucleotide, to a cell without the aid of a carrier and without modification or partial or complete encapsulation of the polyribonucleotide, capped polyribonucleotide, or complex thereof.

[0503] A naked delivery formulation is a formulation that is free from a carrier and wherein the polyribonucleotide is without a covalent modification that binds a moiety that aids in delivery to a cell or without partial or complete encapsulation of the polyribonucleotide. In some embodiments, a polyribonucleotide without a covalent modification that binds a moiety that aids in delivery to a cell is a polyribonucleotide that is not covalently bound to a protein, small molecule, a particle, a polymer, or a biopolymer. A polyribonucleotide without covalent modification that binds a moiety that aids in delivery to a cell does not contain a modified phosphate group. For example, a polyribonucleotide without a covalent modification that binds a moiety that aids in delivery to a cell does not contain phosphorothioate, phosphoroselenates, boranophosphates, boranophosphate esters, hydrogen phosphonates, phosphoramidates, phosphorodiamidates, alkyl or aryl phosphonates, or phosphotriesters.

[0504] In some embodiments, a naked delivery formulation is free of any or all transfection reagents, cationic carriers, carbohydrate carriers, nanoparticle carriers, or protein carriers. In some embodiments, a naked delivery formulation is free from phytoglycogen octenyl succinate, phytoglycogen beta-dextrin, anhydride-modified phytoglycogen beta-dextrin, lipofectamine, polyethylenimine, poly(trimethylenimine), poly(tetramethylenimine), polypropylenimine, aminoglycoside-polyamine, dideoxy-diamino-b-cyclodextrin, spermine, spermidine, poly(2-dimethylamino)ethyl methacrylate, poly(lysine), poly(histidine), poly(arginine), cationized gelatin, dendrimers, chitosan, I,2-Dioleoyl-3-Trimethylammonium-Propane (DOTAP), N-[1-(2,3-dioleoyloxy)propyl]-N,N,N-trimethylammonium chloride (DOTMA), I-[2-(oleoyloxy)ethyl]-2-oleyl-3-(2-hydroxyethyl)imidazolinium chloride (DOTIM), 2,3-dioleyloxy-N-[2(sperminecarboxamido)ethyl]-N,N-dimethyl-I-propanaminium trifluoroacetate (DOSPA), 3B—[N— (N\N′-Dimethylaminoethane)-carbamoyl]Cholesterol Hydrochloride (DC-Cholesterol HCl), diheptadecylamidoglycyl spermidine (DOGS), N,N-distearyl-N,N-dimethylammonium bromide (DDAB), N-(1,2-dimyristyloxyprop-3-yl)-N,N-dimethyl-N-hydroxyethyl ammonium bromide (DMRIE), N,N-dioleyl-N,N-dimethylammonium chloride (DODAC), human serum albumin (HSA), low-density lipoprotein (LDL), high-density lipoprotein (HDL), or globulin.

[0505] In certain embodiments, a naked delivery formulation includes a non-carrier excipient. In some embodiments, a non-carrier excipient includes an inactive ingredient that does not exhibit a cell-penetrating effect. In some embodiments, a non-carrier excipient includes a buffer, for example PBS. In some embodiments, a non-carrier excipient is a solvent, a non-aqueous solvent, a diluent, a suspension aid, a surface-active agent, an isotonic agent, a thickening agent, an emulsifying agent, a preservative, a polymer, a peptide, a protein, a cell, a hyaluronidase, a dispersing agent, a granulating agent, a disintegrating agent, a binding agent, a buffering agent, a lubricating agent, or an oil.

[0506] In some embodiments, a naked delivery formulation includes a diluent. A diluent may be a liquid diluent or a solid diluent. In some embodiments, a diluent is an RNA solubilizing agent, a buffer, or an isotonic agent. Examples of an RNA solubilizing agent include water, ethanol, methanol, acetone, formamide, and 2-propanol. Examples of a buffer include 2-(N-morpholino)ethanesulfonic acid (MES), Bis-Tris, 2-[(2-amino-2-oxoethyl)-(carboxymethyl)amino]acetic acid (ADA), N-(2-Acetamido)-2-aminoethanesulfonic acid (ACES), piperazine-N,N′-bis(2-ethanesulfonic acid) (PIPES), 2-[[1,3-dihydroxy-2-(hydroxymethyl)propan-2-yl]amino]ethanesulfonic acid (TES), 3-(N-morpholino)propanesulfonic acid (MOPS), 4-(2-hydroxyethyl)-1-piperazineethanesulfonic acid (HEPES), Tris, Tricine, Gly-Gly, Bicine, or phosphate. Examples of an isotonic agent include glycerin, mannitol, polyethylene glycol, propylene glycol, trehalose, or sucrose.

[0507] In some embodiments, the formulation includes a cell-penetrating agent. In some embodiments, the formulation is a topical formulation and includes a cell-penetrating agent. The cell-penetrating agent can include organic compounds such as alcohols having one or more hydroxyl function groups. In some cases, the cell-penetrating agent includes an alcohol such as, but not limited to, monohydric alcohols, polyhydric alcohols, unsaturated aliphatic alcohols, and alicyclic alcohols. The cell-penetrating agent can include one or more of methanol, ethanol, isopropanol, phenoxyethanol, triethanolamine, phenethyl alcohol, butanol, pentanol, cetyl alcohol, ethylene glycol, propylene glycol, denatured alcohol, benzyl alcohol, specially denatured alcohol, glycol, stearyl alcohol, cetearyl alcohol, menthol, polyethylene glycols (PEG)-400, ethoxylated fatty acids, or hydroxyethylcellulose. In certain embodiments, the cell-penetrating agent includes ethanol. The cell-penetrating agents can include any cell-penetrating agent in any amount or in any formulation as described in WO 2020/180751 or WO 2020/180752, which are hereby incorporated by reference in their entirety.

### Carriers

[0508] In some embodiments, an immunogenic composition of the invention comprises a circular polyribonucleotide and a carrier. In some embodiments, an immunogenic composition of the invention comprises a linear polyribonucleotide and a carrier.

[0509] In certain embodiments, an immunogenic composition comprises a circular polyribonucleotide as described herein in a vesicle or other membrane-based carrier. In certain embodiments, an immunogenic composition comprises a linear polyribonucleotide as described herein in a vesicle or other membrane-based carrier.

[0510] In other embodiments, an immunogenic composition includes the polyribonucleotide in or via a cell, vesicle, or other membrane-based carrier. In one embodiment, an immunogenic composition includes the polyribonucleotide in liposomes or other similar vesicles. Liposomes are spherical vesicle structures composed of a uni- or multilamellar lipid bilayer surrounding internal aqueous compartments and a relatively impermeable outer lipophilic phospholipid bilayer. Liposomes may be anionic, neutral, or cationic. Liposomes are biocompatible, nontoxic, can deliver both hydrophilic and lipophilic drug molecules, protect their cargo from degradation by plasma enzymes, and transport their load across biological membranes and the blood brain barrier (BBB) (see, e.g., Spuch and Navarro, JOURNAL OF DRUG DELIVERY, vol. 2011, Article ID 469679, 12 pages, 2011. doi:10.1155/2011/469679 for review).

[0511] Vesicles can be made from several different types of lipids; however, phospholipids are most commonly used to generate liposomes as drug carriers. Methods for preparation of multilamellar vesicle lipids are known in the art (see for example U.S. Pat. No. 6,693,086, the teachings of which relating to multilamellar vesicle lipid preparation are incorporated herein by reference). Although vesicle formation can be spontaneous when a lipid film is mixed with an aqueous solution, it can also be expedited by applying force in the form of shaking by using a homogenizer, sonicator, or an extrusion apparatus (see, e.g., Spuch and Navarro, JOURNAL OF DRUG DELIVERY, vol. 2011, Article ID 469679, 12 pages, 2011. doi:10.1155/2011/469679 for review). Extruded lipids can be prepared by extruding through filters of decreasing size, as described in Templeton et al., NATURE BIOTECH, 15:647-52, 1997, the teachings of which relating to extruded lipid preparation are incorporated herein by reference.

[0512] In certain embodiments, an immunogenic composition of the disclosure includes a polyribonucleotide and lipid nanoparticles, for example lipid nanoparticles described herein. Lipid nanoparticles are another example of a carrier that provides a biocompatible and biodegradable delivery system for a polyribonucleotide molecule as described herein. Nanostructured lipid carriers (NLCs) are modified solid lipid nanoparticles (SLNs) that retain the characteristics of the SLN, improve drug stability and loading capacity, and prevent drug leakage. Polymer nanoparticles (PNPs) are an important component of drug delivery. These nanoparticles can effectively direct drug delivery to specific targets and improve drug stability and controlled drug release. Lipid-polymer nanoparticles (PLNs), a new type of carrier that combines liposomes and polymers, may also be employed. These nanoparticles possess the complementary advantages of PNPs and liposomes. A PLN is composed of a core-shell structure; the polymer core provides a stable structure, and the phospholipid shell offers good biocompatibility. As such, the two components increase the drug encapsulation efficiency rate, facilitate surface modification, and prevent leakage of water-soluble drugs. For a review, see, e.g., Li et al. 2017, Nanomaterials 7, 122; doi:10.3390/nano7060122.

[0513] Additional non-limiting examples of carriers include carbohydrate carriers (e.g., an anhydride-modified phytoglycogen or glycogen-type material), protein carriers (e.g., a protein covalently linked to the polyribonucleotide), or cationic carriers (e.g., a cationic lipopolymer or transfection reagent). Non-limiting examples of carbohydrate carriers include phytoglycogen octenyl succinate, phytoglycogen beta-dextrin, and anhydride-modified phytoglycogen beta-dextrin. Non-limiting examples of cationic carriers include lipofectamine, polyethylenimine, poly(trimethylenimine), poly(tetramethylenimine), polypropylenimine, aminoglycoside-polyamine, dideoxy-diamino-b-cyclodextrin, spermine, spermidine, poly(2-dimethylamino)ethyl methacrylate, poly(lysine), poly(histidine), poly(arginine), cationized gelatin, dendrimers, chitosan, 1,2-Dioleoyl-3-Trimethylammonium-Propane (DOTAP), N-[1-(2,3-dioleoyloxy)propyl]-N,N,N-trimethylammonium chloride (DOTMA), I-[2-(oleoyloxy)ethyl]-2-oleyl-3-(2-hydroxyethyl)imidazolinium chloride (DOTIM), 2,3-dioleyloxy-N-[2(sperminecarboxamido)ethyl]-N,N-dimethyl-I-propanaminium trifluoroacetate (DOSPA), 3B—[N— (N\N′-Dimethylaminoethane)-carbamoyl]Cholesterol Hydrochloride (DC-Cholesterol HCl), diheptadecylamidoglycyl spermidine (DOGS), N,N-distearyl-N,N-dimethylammonium bromide (DDAB), N-(1,2-dimyristyloxyprop-3-yl)-N,N-dimethyl-N-hydroxyethyl ammonium bromide (DMRIE), and N,N-dioleyl-N,N-dimethylammonium chloride (DODAC). Non-limiting examples of protein carriers include human serum albumin (HSA), low-density lipoprotein (LDL), high-density lipoprotein (HDL), or globulin.

[0514] Exosomes can also be used as drug delivery vehicles for an RNA composition or preparation described herein. For a review, see Ha et al. July 2016. ACTA PHARMACEUTICA SINICA B. Volume 6, Issue 4, Pages 287-296; https://doi.org/10.1016/j.apsb.2016.02.001.

[0515] Ex vivo differentiated red blood cells can also be used as a carrier for an RNA composition or preparation described herein. See, e.g., International Patent Publication Nos. WO2015/073587; WO2017/123646; WO2017/123644; WO2018/102740; WO2016/183482; WO2015/153102; WO2018/151829; WO2018/009838; Shi et al. 2014. Proc Natl Acad Sci USA. 111(28): 10131-10136; U.S. Pat. No. 9,644,180; Huang et al. 2017. NATURE COMMUNICATIONS 8: 423; Shi et al. 2014. PROC NATL ACAD SCI USA. 111(28): 10131-136.

[0516] Fusosome compositions, e.g., as described in International Patent Publication No. WO2018/208728, can also be used as carriers to deliver a polyribonucleotide molecule described herein.

[0517] Virosomes and virus-like particles (VLPs) can also be used as carriers to deliver a polyribonucleotide molecule described herein to targeted cells.

[0518] Plant nanovesicles and plant messenger packs (PMPs), e.g., as described in International Patent Publication Nos. WO2011/097480, WO2013/070324, WO2017/004526, or WO2020/041784 can also be used as carriers to deliver the RNA composition or preparation described herein.

[0519] Microbubbles can also be used as carriers to deliver a polyribonucleotide molecule described herein. See, e.g., U.S. Pat. No. 7,115,583; Beeri, R. et al., CIRCULATION. 2002 Oct. 1; 106(14):1756-59; Bez, M. et al., NAT PROTOC. 2019 April; 14(4): 1015-26; Hernot, S. et al., ADV DRUG DELIV REV. 2008 Jun. 30; 60(10): 1153-66; Rychak, J. J. et al., ADV DRUG DELIV REV. 2014 June; 72: 82-93. In some embodiments, microbubbles are albumin-coated perfluorocarbon microbubbles.

[0520] The carrier including the polyribonucleotides described herein may include a plurality of particles. The particles may have median article size of 30 to 700 nanometers (e.g., 30 to 50, 50 to 100, 100 to 200, 200 to 300, 300 to 400, 400 to 500, 500 to 600, 600 to 700, 100 to 500, 50 to 500, or 200 to 700 nanometers). The size of the particle may be optimized to favor deposition of the payload, including the polyribonucleotide into a cell. Deposition of the polyribonucleotide into certain cell types may favor different particle sizes. For example, the particle size may be optimized for deposition of the polyribonucleotide into immunogen presenting cells. The particle size may be optimized for deposition of the polyribonucleotide into dendritic cells. Additionally, the particle size may be optimized for depositions of the polyribonucleotide into draining lymph node cells.

### Lipid Nanoparticles

[0521] The compositions, methods, and delivery systems provided by the present disclosure may employ any suitable carrier or delivery modality described herein, including, in certain embodiments, lipid nanoparticles (LNPs). Lipid nanoparticles, in some embodiments, include one or more ionic lipids, such as non-cationic lipids (e.g., neutral or anionic, or zwitterionic lipids); one or more conjugated lipids (such as PEG-conjugated lipids or lipids conjugated to polymers described in Table 5 of WO2019217941; incorporated herein by reference in its entirety); one or more sterols (e.g., cholesterol).

[0522] Lipids that can be used in nanoparticle formations (e.g., lipid nanoparticles) include, for example those described in Table 4 of WO2019217941, which is incorporated by reference—e.g., a lipid-containing nanoparticle can include one or more of the lipids in Table 4 of WO2019217941. Lipid nanoparticles can include additional elements, such as polymers, such as the polymers described in Table 5 of WO2019217941, incorporated by reference.

[0523] In some embodiments, conjugated lipids, when present, can include one or more of PEG-diacylglycerol (DAG) (such as I-(monomethoxy-polyethyleneglycol)-2,3-dimyristoylglycerol (PEG-DMG)), PEG-dialkyloxypropyl (DAA), PEG-phospholipid, PEG-ceramide (Cer), a pegylated phosphatidylethanoloamine (PEG-PE), PEG succinate diacylglycerol (PEGS-DAG) (such as 4-O-(2′,3′-di(tetradecanoyloxy)propyl-I-O-(w-methoxy(polyethoxy)ethyl) butanedioate (PEG-S-DMG)), PEG dialkoxypropylcarbam, N-(carbonyl-methoxypoly ethylene glycol 2000)-1,2-distearoyl-sn-glycero-3-phosphoethanolamine sodium salt, and those described in Table 2 of WO2019051289 (incorporated by reference), and combinations of the foregoing.

[0524] In some embodiments, sterols that can be incorporated into lipid nanoparticles include one or more of cholesterol or cholesterol derivatives, such as those in WO2009/127060 or US2010/0130588, which are incorporated by reference. Additional exemplary sterols include phytosterols, including those described in Eygeris et al. (2020), dx.doi.org/10.1021/acs.nanolett.0c01386, incorporated herein by reference.

[0525] In some embodiments, the lipid particle includes an ionizable lipid, a non-cationic lipid, a conjugated lipid that inhibits aggregation of particles, and a sterol. The amounts of these components can be varied independently and to achieve desired properties. For example, in some embodiments, the lipid nanoparticle includes an ionizable lipid is in an amount from about 20 mol % to about 90 mol % of the total lipids (in other embodiments it may be 20-70% (mol), 30-60% (mol) or 40-50% (mol); about 50 mol % to about 90 mol % of the total lipid present in the lipid nanoparticle), a non-cationic lipid in an amount from about 5 mol % to about 30 mol % of the total lipids, a conjugated lipid in an amount from about 0.5 mol % to about 20 mol % of the total lipids, and a sterol in an amount from about 20 mol % to about 50 mol % of the total lipids. The ratio of total lipid to nucleic acid can be varied as desired. For example, the total lipid to nucleic acid (mass or weight) ratio can be from about 10:1 to about 30:1.

[0526] In some embodiments, the lipid to nucleic acid ratio (mass/mass ratio; w/w ratio) can be in the range of from about 1:1 to about 25:1, from about 10:1 to about 14:1, from about 3:1 to about 15:1, from about 4:1 to about 10:1, from about 5:1 to about 9:1, or about 6:1 to about 9:1. The amounts of lipids and nucleic acid can be adjusted to provide a desired N/P ratio, for example, N/P ratio of 3, 4, 5, 6, 7, 8, 9, 10 or higher. Generally, the lipid nanoparticle formulation's overall lipid content can range from about 5 mg/ml to about 30 mg/mL.

[0527] Some non-limiting example of lipid compounds that may be used (e.g., in combination with other lipid components) to form lipid nanoparticles for the delivery of compositions described herein, e.g., nucleic acid (e.g., RNA (e.g., circular polyribonucleotide, linear polyribonucleotide)) described herein includes,

[chemical structure]

[0528] In some embodiments an LNP including Formula (i) is used to deliver a polyribonucleotide (e.g., a circular polyribonucleotide, a linear polyribonucleotide) composition described herein to cells.

[chemical structure]

[0529] In some embodiments an LNP including Formula (ii) is used to deliver a polyribonucleotide (e.g., a circular polyribonucleotide, a linear polyribonucleotide) composition described herein to cells.

[chemical structure]

[0530] In some embodiments an LNP including Formula (iii) is used to deliver a polyribonucleotide (e.g., a circular polyribonucleotide, a linear polyribonucleotide) composition described herein to cells.

[chemical structure]

[0531] In some embodiments an LNP including Formula (v) is used to deliver a polyribonucleotide (e.g., a circular polyribonucleotide, a linear polyribonucleotide) composition described herein to cells.

[chemical structure]

[0532] In some embodiments an LNP including Formula (vi) is used to deliver a polyribonucleotide (e.g., a circular polyribonucleotide, a linear polyribonucleotide) composition described herein to cells.

[chemical structure]

[0533] In some embodiments an LNP including Formula (viii) is used to deliver a polyribonucleotide (e.g., a circular polyribonucleotide, a linear polyribonucleotide) composition described herein to cells.

[chemical structure]

[0534] In some embodiments an LNP including Formula (ix) is used to deliver a polyribonucleotide (e.g., a circular polyribonucleotide, a linear polyribonucleotide) composition described herein to cells.

[chemical structure]

[0535] wherein
[0536] X¹ is O, NR¹, or a direct bond, X² is C2-5 alkylene, X³ is C(═O) or a direct bond, R¹ is H or Me, R³ is C₁₋₃ alkyl, R² is C₁₋₃ alkyl, or R² taken together with the nitrogen atom to which it is attached and 1-3 carbon atoms of X² form a 4-, 5-, or 6-membered ring, or X¹ is NR¹, R¹ and R² taken together with the nitrogen atoms to which they are attached form a 5- or 6-membered ring, or R² taken together with R³ and the nitrogen atom to which they are attached form a 5-, 6-, or 7-membered ring, Y¹ is C2-12 alkylene, Y² is selected from

[chemical structure]

[0537] n is 0 to 3, R⁴ is C₁₋₁₅ alkyl, Z¹ is C₁₋₆ alkylene or a direct bond,
[0538] Z² is 0

[chemical structure]

[0539] (in either orientation) or absent, provided that if Z¹ is a direct bond, Z² is absent;
[0540] R⁵ is C5-9 alkyl or C6-10 alkoxy, R⁶ is C5-9 alkyl or C6-10 alkoxy, W is methylene or a direct bond, and
[0541] R⁷ is H or Me, or a salt thereof, provided that if R³ and R² are C2 alkyls, X¹ is O, X² is linear C3 alkylene,
[0542] X³ is C(═O), Y¹ is linear Ce alkylene, (Y²)n-R⁴ is

[chemical structure]

R⁴ is linear C5 alkyl, Z¹ is C2 alkylene, Z² is absent, W is methylene, and R⁷ is H, then R⁵ and R⁶ are not Cx alkoxy.

[0543] In some embodiments an LNP including Formula (xii) is used to deliver a polyribonucleotide (e.g., a circular polyribonucleotide, a linear polyribonucleotide) composition described herein to cells.

[chemical structure]

[0544] In some embodiments an LNP including Formula (xi) is used to deliver a polyribonucleotide (e.g., a circular polyribonucleotide, a linear polyribonucleotide) composition described herein to cells.

[chemical structure]

[0545] In some embodiments an LNP includes a compound of Formula (xiii) and a compound of Formula (xiv).

[chemical structure]

[0546] In some embodiments an LNP including Formula (xv) is used to deliver a polyribonucleotide (e.g., a circular polyribonucleotide, a linear polyribonucleotide) composition described herein to cells.

[chemical structure]

[0547] In some embodiments an LNP including a formulation of Formula (xvi) is used to deliver a polyribonucleotide (e.g., a circular polyribonucleotide, a linear polyribonucleotide) composition described herein to cells.

[chemical structure]

[0548] In some embodiments, a lipid compound used to form lipid nanoparticles for the delivery of compositions described herein, e.g., nucleic acid (e.g., RNA (e.g., circular polyribonucleotide, linear polyribonucleotide)) described herein is made by one of the following reactions:

[chemical structure]

[chemical structure]

[0549] In some embodiments an LNP including Formula (xxi) is used to deliver a polyribonucleotide (e.g., a circular polyribonucleotide, a linear polyribonucleotide) composition described herein to cells. In some embodiments the LNP of Formula (xxi) is an LNP described by WO2021113777 (e.g., a lipid of Formula (1) such as a lipid of Table 1 of WO2021113777).

[chemical structure]

wherein
[0550] each n is independently an integer from 2-15; L₁ and L₃ are each independently —OC(O)—* or —C(O)O—*, wherein “*” indicates the attachment point to R₁ or R₃.

[0551] R₁ and R₃ are each independently a linear or branched C9-C20 alkyl or C9-C20 alkenyl, optionally substituted by one or more substituents selected from a group consisting of oxo, halo, hydroxy, cyano, alkyl, alkenyl, aldehyde, heterocyclylalkyl, hydroxyalkyl, dihydroxyalkyl, hydroxyalkylaminoalkyl, aminoalkyl, alkylaminoalkyl, dialkylaminoalkyl, (heterocyclyl)(alkyl)aminoalkyl, heterocyclyl, heteroaryl, alkylheteroaryl, alkynyl, alkoxy, amino, dialkylamino, aminoalkylcarbonylamino, aminocarbonylalkylamino, (aminocarbonylalkyl)(alkyl)amino, alkenylcarbonylamino, hydroxycarbonyl, alkyloxycarbonyl, aminocarbonyl, aminoalkylaminocarbonyl, alkylaminoalkylaminocarbonyl, dialkylaminoalkylaminocarbonyl, heterocyclylalkylaminocarbonyl, (alkylaminoalkyl)(alkyl)aminocarbonyl, alkylaminoalkylcarbonyl, dialkylaminoalkylcarbonyl, heterocyclylcarbonyl, alkenylcarbonyl, alkynylcarbonyl, alkylsulfoxide, alkylsulfoxidealkyl, alkyl sulfonyl, and alkyl sulfonealkyl; and
[0552] R₂ is selected from a group consisting of:

[chemical structure]

[chemical structure]

[0553] In some embodiments an LNP including Formula (xxii) is used to deliver a polyribonucleotide (e.g., a circular polyribonucleotide, a linear polyribonucleotide) composition described herein to cells. In some embodiments the LNP of Formula (xxii) is an LNP described by WO2021113777 (e.g., a lipid of Formula (2) such as a lipid of Table 2 of WO2021113777).

[chemical structure]

wherein
[0554] each n is independently an integer from 1-15;
[0555] R₁ and R₂ are each independently selected from a group consisting of:

[chemical structure]

[chemical structure]

[0556] R₃ is selected from a group consisting of:

[chemical structure]

[0557] In some embodiments an LNP including Formula (xxiii) is used to deliver a polyribonucleotide (e.g., a circular polyribonucleotide, a linear polyribonucleotide) composition described herein to cells. In some embodiments the LNP of Formula (xxiii) is an LNP described by WO2021113777 (e.g., a lipid of Formula (3) such as a lipid of Table 3 of WO2021113777).

[chemical structure]

wherein
[0558] X is selected from —O—, —S—, or —OC(O)—*, wherein * indicates the attachment point to R₁;
[0559] R is selected from a group consisting of;

[chemical structure]

[0560] and R₂ is selected from a group consisting of:

[chemical structure]

[0561] In some embodiments, a composition described herein (e.g., a nucleic acid (e.g., a circular polyribonucleotide, a linear polyribonucleotide) or a protein) is provided in an LNP that includes an ionizable lipid. In some embodiments, the ionizable lipid is heptadecan-9-yl 8-((2-hydroxyethyl) (6-oxo-6-(undecyloxy)hexyl)amino)octanoate (SM-102); e.g., as described in Example 1 of U.S. Pat. No. 9,867,888 (incorporated by reference herein in its entirety). In some embodiments, the ionizable lipid is 9Z,12Z)-3-((4,4-bis(octyloxy)butanoyl)oxy)-2-((((3-(diethylamino)propoxy)carbonyl)oxy)methyl)propyl octadeca-9,12-dienoate (LP01), e.g., as synthesized in Example 13 of WO2015/095340 (incorporated by reference herein in its entirety). In some embodiments, the ionizable lipid is Di((Z)-non-2-en-1-yl) 9-((4-dimethylamino) butanoyl)oxy) heptadecanedioate (L319), e.g., as synthesized in Example 7, 8, or 9 of US2012/0027803 (incorporated by reference herein in its entirety). In some embodiments, the ionizable lipid is 1,1′-((2-(4-(2-((2-(Bis(2-hydroxydodecyl)amino)ethyl)(2-hydroxydodecyl) amino)ethyl)piperazin-1-yl)ethyl)azanediyl)bis(dodecan-2-ol) (C12-200), e.g., as synthesized in Examples 14 and 16 of WO2010/053572 (incorporated by reference herein in its entirety). In some embodiments, the ionizable lipid is Imidazole cholesterol ester (ICE) lipid (3S, 10R, 13R, 17R)-10, 13-dimethyl-17-((R)-6-methylheptan-2-yl)-2, 3, 4, 7, 8, 9, 10, 11, 12, 13, 14, 15, 16, 17-tetradecahydro-IH-cyclopenta[a]phenanthren-3-yl 3-(1H-imidazol-4-yl) propanoate, e.g., Structure (I) from WO2020/106946 (incorporated by reference herein in its entirety).

[0562] In some embodiments, an ionizable lipid may be a cationic lipid, an ionizable cationic lipid, e.g., a cationic lipid that can exist in a positively charged or neutral form depending on pH, or an amine-containing lipid that can be readily protonated. In some embodiments, the cationic lipid is a lipid capable of being positively charged, e.g., under physiological conditions. Exemplary cationic lipids include one or more amine group(s) which bear the positive charge. In some embodiments, the lipid particle includes a cationic lipid in formulation with one or more of neutral lipids, ionizable amine-containing lipids, biodegradable alkyne lipids, steroids, phospholipids including polyunsaturated lipids, structural lipids (e.g., sterols), PEG, cholesterol, and polymer conjugated lipids. In some embodiments, the cationic lipid may be an ionizable cationic lipid. An exemplary cationic lipid as disclosed herein may have an effective pKa over 6.0. In embodiments, a lipid nanoparticle may include a second cationic lipid having a different effective pKa (e.g., greater than the first effective pKa), than the first cationic lipid. A lipid nanoparticle may include between 40 and 60 mol percent of a cationic lipid, a neutral lipid, a steroid, a polymer conjugated lipid, and a therapeutic agent, e.g., a nucleic acid (e.g., RNA (e.g., a circular polyribonucleotide, a linear polyribonucleotide)) described herein, encapsulated within or associated with the lipid nanoparticle. In some embodiments, the nucleic acid is co-formulated with the cationic lipid. The nucleic acid may be adsorbed to the surface of an LNP, e.g., an LNP including a cationic lipid. In some embodiments, the nucleic acid may be encapsulated in an LNP, e.g., an LNP including a cationic lipid. In some embodiments, the lipid nanoparticle may include a targeting moiety, e.g., coated with a targeting agent. In embodiments, the LNP formulation is biodegradable. In some embodiments, a lipid nanoparticle including one or more lipid described herein, e.g., Formula (i), (ii), (ii), (vii) and/or (ix) encapsulates at least 1%, at least 5%, at least 10%, at least 20%, at least 30%, at least 40%, at least 50%, at least 60%, at least 70%, at least 80%, at least 90%, at least 92%, at least 95%, at least 97%, at least 98% or 100% of an RNA molecule.

[0563] Exemplary ionizable lipids that can be used in lipid nanoparticle formulations include, without limitation, those listed in Table 1 of WO2019051289, incorporated herein by reference. Additional exemplary lipids include, without limitation, one or more of the following formulae: X of US2016/0311759; I of US20150376115 or in US2016/0376224; I, II or III of US20160151284; I, IA, II, or IIA of US20170210967; I-c of US20150140070; A of US2013/0178541; I of US2013/0303587 or US2013/0123338; I of US2015/0141678; II, III, IV, or V of US2015/0239926; I of US2017/0119904; I or II of WO2017/117528; A of US2012/0149894; A of US2015/0057373; A of WO2013/116126; A of US2013/0090372; A of US2013/0274523; A of US2013/0274504; A of US2013/0053572; A of WO2013/016058; A of WO2012/162210; I of US2008/042973; I, II, III, or IV of US2012/01287670; I or II of US2014/0200257; I, II, or III of US2015/0203446; I or III of US2015/0005363; I, IA, IB, IC, ID, II, IIA, IIB, IIC, IID, or III-XXIV of US2014/0308304; of US2013/0338210; I, II, III, or IV of WO2009/132131; A of US2012/01011478; I or XXXV of US2012/0027796; XIV or XVII of US2012/0058144; of US2013/0323269; I of US2011/0117125; I, II, or III of US2011/0256175; I, II, III, IV, V, VI, VII, VIII, IX, X, XI, XII of US2012/0202871; I, II, III, IV, V, VI, VII, VIII, X, XII, XIII, XIV, XV, or XVI of US2011/0076335; I or II of US2006/008378; I of US2013/0123338; I or X-A-Y-Z of US2015/0064242; XVI, XVII, or XVIII of US2013/0022649; I, II, or III of US2013/0116307; I, II, or III of US2013/0116307; I or II of US2010/0062967; I-X of US2013/0189351; I of US2014/0039032; V of US2018/0028664; I of US2016/0317458; I of US2013/0195920; 5, 6, or 10 of U.S. Pat. No. 10,221,127; III-3 of WO2018/081480; I-5 or I-8 of WO2020/081938; 18 or 25 of U.S. Pat. No. 9,867,888; A of US2019/0136231; II of WO2020/219876; I of US2012/0027803; OF-02 of US2019/0240349; 23 of U.S. Pat. No. 10,086,013; cKK-E12/A6 of Miao et al (2020); C12-200 of WO2010/053572; 7C1 of Dahlman et al (2017); 304-013 or 503-013 of Whitehead et al; TS-P4C2 of U.S. Pat. No. 9,708,628; I of WO2020/106946; I of WO2020/106946; and (1), (2), (3), or (4) of WO2021/113777. Exemplary lipids further include a lipid of any one of Tables 1-16 of WO2021/113777.

[0564] In some embodiments, the ionizable lipid is MC3 (6Z,9Z,28Z,3 IZ)-heptatriaconta-6,9,28,31-tetraen-I9-yl-4-(dimethylamino) butanoate (DLin-MC3-DMA or MC3), e.g., as described in Example 9 of WO2019051289A9 (incorporated by reference herein in its entirety). In some embodiments, the ionizable lipid is the lipid ATX-002, e.g., as described in Example 10 of WO2019051289A9 (incorporated by reference herein in its entirety). In some embodiments, the ionizable lipid is (13Z,16Z)-A,A-dimethyl-3-nonyldocosa-I3,I6-dien-I-amine (Compound 32), e.g., as described in Example 11 of WO2019051289A9 (incorporated by reference herein in its entirety). In some embodiments, the ionizable lipid is Compound 6 or Compound 22, e.g., as described in Example 12 of WO2019051289A9 (incorporated by reference herein in its entirety).

[0565] Exemplary non-cationic lipids include, but are not limited to, distearoyl-sn-glycero-phosphoethanolamine, distearoylphosphatidylcholine (DSPC), dioleoylphosphatidylcholine (DOPC), dipalmitoylphosphatidylcholine (DPPC), dioleoylphosphatidylglycerol (DOPG), dipalmitoylphosphatidylglycerol (DPPG), dioleoyl-phosphatidylethanolamine (DOPE), palmitoyloleoylphosphatidylcholine (POPC), palmitoyloleoylphosphatidylethanolamine (POPE), dioleoyl-phosphatidylethanolamine 4-(N-maleimidomethyl)-cyclohexane-1-carboxylate (DOPE-mal), dipalmitoyl phosphatidyl ethanolamine (DPPE), dimyristoylphosphoethanolamine (DMPE), distearoyl-phosphatidyl-ethanolamine (DSPE), monomethyl-phosphatidylethanolamine (such as 16-O-monomethyl PE), dimethyl-phosphatidylethanolamine (such as 16-O-dimethyl PE), I8-I-trans PE, I-stearoyl-2-oleoyl-phosphatidyethanolamine (SOPE), hydrogenated soy phosphatidylcholine (HSPC), egg phosphatidylcholine (EPC), dioleoylphosphatidylserine (DOPS), sphingomyelin (SM), dimyristoyl phosphatidylcholine (DMPC), dimyristoyl phosphatidylglycerol (DMPG), distearoylphosphatidylglycerol (DSPG), dierucoylphosphatidylcholine (DEPC), palmitoyloleyolphosphatidylglycerol (POPG), dielaidoyl-phosphatidylethanolamine (DEPE), lecithin, phosphatidylethanolamine, lysolecithin, lysophosphatidylethanolamine, phosphatidylserine, phosphatidylinositol, sphingomyelin, egg sphingomyelin (ESM), cephalin, cardiolipin, phosphatidicacid, cerebrosides, dicetylphosphate, lysophosphatidylcholine, dilinoleoylphosphatidylcholine, or mixtures thereof. It is understood that other diacylphosphatidylcholine and diacylphosphatidylethanolamine phospholipids can also be used. The acyl groups in these lipids are preferably acyl groups derived from fatty acids having C10-C24 carbon chains, e.g., lauroyl, myristoyl, paimitoyl, stearoyl, or oleoyl. Additional exemplary lipids, in certain embodiments, include, without limitation, those described in Kim et al. (2020) dx.doi.org/10.1021/acs.nanolett.0c01386, incorporated herein by reference. Such lipids include, in some embodiments, plant lipids found to improve liver transfection with mRNA (e.g., DGTS).

[0566] Other examples of non-cationic lipids suitable for use in the lipid nanoparticles include, without limitation, nonphosphorous lipids such as, e.g., stearylamine, dodeeylamine, hexadecylamine, acetyl palmitate, glycerol ricinoleate, hexadecyl stereate, isopropyl myristate, amphoteric acrylic polymers, triethanolamine-lauryl sulfate, alkyl-aryl sulfate polyethyloxylated fatty acid amides, dioctadecyl dimethyl ammonium bromide, ceramide, sphingomyelin, and the like. Other non-cationic lipids are described in WO2017/099823 or US patent publication US2018/0028664, the contents of which is incorporated herein by reference in their entirety.

[0567] In some embodiments, the non-cationic lipid is oleic acid or a compound of Formula I, II, or IV of US2018/0028664, incorporated herein by reference in its entirety. The non-cationic lipid can include, for example, 0-30% (mol) of the total lipid present in the lipid nanoparticle. In some embodiments, the non-cationic lipid content is 5-20% (mol) or 10-15% (mol) of the total lipid present in the lipid nanoparticle. In embodiments, the molar ratio of ionizable lipid to the neutral lipid ranges from about 2:1 to about 8:1 (e.g., about 2:1, 3:1, 4:1, 5:1, 6:1, 7:1, or 8:1).

[0568] In some embodiments, the lipid nanoparticles do not include any phospholipids.

[0569] In some aspects, the lipid nanoparticle can further include a component, such as a sterol, to provide membrane integrity. One exemplary sterol that can be used in the lipid nanoparticle is cholesterol and derivatives thereof. Non-limiting examples of cholesterol derivatives include polar analogues such as 5α-cholestanol, 53-coprostanol, cholesteryl-(2-hydroxy)-ethyl ether, cholesteryl-(4′-hydroxy)-butyl ether, and 6-ketocholestanol; non-polar analogues such as 5α-cholestane, cholestenone, 5α-cholestanone, 5p-cholestanone, and cholesteryl decanoate; and mixtures thereof. In some embodiments, the cholesterol derivative is a polar analogue, e.g., cholesteryl-(4′-hydroxy)-butyl ether. Exemplary cholesterol derivatives are described in PCT publication WO2009/127060 and US patent publication US2010/0130588, each of which is incorporated herein by reference in its entirety.

[0570] In some embodiments, the component providing membrane integrity, such as a sterol, can include 0-50% (mol) (e.g., 0-10%, 10-20%, 20-30%, 30-40%, or 40-50%) of the total lipid present in the lipid nanoparticle. In some embodiments, such a component is 20-50% (mol) 30-40% (mol) of the total lipid content of the lipid nanoparticle.

[0571] In some embodiments, the lipid nanoparticle can include a polyethylene glycol (PEG) or a conjugated lipid molecule. Generally, these are used to inhibit aggregation of lipid nanoparticles and/or provide steric stabilization. Exemplary conjugated lipids include, but are not limited to, PEG-lipid conjugates, polyoxazoline (POZ)-lipid conjugates, polyamide-lipid conjugates (such as ATTA-lipid conjugates), cationic-polymer lipid (CPL) conjugates, and mixtures thereof. In some embodiments, the conjugated lipid molecule is a PEG-lipid conjugate, for example, a (methoxy polyethylene glycol)-conjugated lipid.

[0572] Exemplary PEG-lipid conjugates include, but are not limited to, PEG-diacylglycerol (DAG) (such as I-(monomethoxy-polyethyleneglycol)-2,3-dimyristoylglycerol (PEG-DMG)), PEG-dialkyloxypropyl (DAA), PEG-phospholipid, PEG-ceramide (Cer), a pegylated phosphatidylethanoloamine (PEG-PE), PEG succinate diacylglycerol (PEGS-DAG) (such as 4-O-(2′,3′-di(tetradecanoyloxy)propyl-I-O-(w-methoxy(polyethoxy)ethyl) butanedioate (PEG-S-DMG)), PEG dialkoxypropylcarbam, N-(carbonyl-methoxypolyethylene glycol 2000)-1,2-distearoyl-sn-glycero-3-phosphoethanolamine sodium salt, or a mixture thereof. Additional exemplary PEG-lipid conjugates are described, for example, in U.S. Pat. Nos. 5,885,613, 6,287,591, US2003/0077829, US2003/0077829, US2005/0175682, US2008/0020058, US2011/0117125, US2010/0130588, US2016/0376224, US2017/0119904, US2018/0028664, and WO2017/099823, the contents of all of which are incorporated herein by reference in their entirety. In some embodiments, a PEG-lipid is a compound of Formula III, III-a-1, III-a-2, III-b-1, III-b-2, or V of US2018/0028664, the content of which is incorporated herein by reference in its entirety. In some embodiments, a PEG-lipid is of Formula II of US20150376115 or US2016/0376224, the content of both of which is incorporated herein by reference in its entirety. In some embodiments, the PEG-DAA conjugate can be, for example, PEG-dilauryloxypropyl, PEG-dimyristyloxypropyl, PEG-dipalmityloxypropyl, or PEG-distearyloxypropyl. The PEG-lipid can be one or more of PEG-DMG, PEG-dilaurylglycerol, PEG-dipalmitoylglycerol, PEG-disterylglycerol, PEG-dilaurylglycamide, PEG-dimyristylglycamide, PEG-dipalmitoylglycamide, PEG-disterylglycamide, PEG-cholesterol (I-[8′-(Cholest-5-en-3[beta]-oxy)carboxamido-3′,6′-dioxaoctanyl]carbamoyl-[omega]-methyl-poly(ethylene glycol), PEG-DMB (3,4-Ditetradecoxylbenzyl-[omega]-methyl-poly(ethylene glycol) ether), and 1,2-dimyristoyl-sn-glycero-3-phosphoethanolamine-N-[methoxy(polyethylene glycol)-2000]. In some embodiments, the PEG-lipid includes PEG-DMG, 1,2-dimyristoyl-sn-glycero-3-phosphoethanolamine-N-[methoxy(polyethylene glycol)-2000]. In some embodiments, the PEG-lipid includes a structure selected from:

[chemical structure]

[0573] In some embodiments, lipids conjugated with a molecule other than a PEG can also be used in place of PEG-lipid. For example, polyoxazoline (POZ)-lipid conjugates, polyamide-lipid conjugates (such as ATTA-lipid conjugates), and cationic-polymer lipid (GPL) conjugates can be used in place of or in addition to the PEG-lipid.

[0574] Exemplary conjugated lipids, i.e., PEG-lipids, (POZ)-lipid conjugates, ATTA-lipid conjugates and cationic polymer-lipids are described in the PCT and LIS patent applications listed in Table 2 of WO2019051289A9, the contents of all of which are incorporated herein by reference in their entirety.

[0575] In some embodiments, the PEG or the conjugated lipid can include 0-20% (mol) of the total lipid present in the lipid nanoparticle. In some embodiments, PEG or the conjugated lipid content is 0.5-10% or 2-5% (mol) of the total lipid present in the lipid nanoparticle. Molar ratios of the ionizable lipid, non-cationic-lipid, sterol, and PEG/conjugated lipid can be varied as needed. For example, the lipid particle can include 30-70% ionizable lipid by mole or by total weight of the composition, 0-60% cholesterol by mole or by total weight of the composition, 0-30% non-cationic lipid by mole or by total weight of the composition and 1-10% conjugated lipid by mole or by total weight of the composition. Preferably, the composition includes 30-40% ionizable lipid by mole or by total weight of the composition, 40-50% cholesterol by mole or by total weight of the composition, and 10-20% non-cationic-lipid by mole or by total weight of the composition. In some other embodiments, the composition is 50-75% ionizable lipid by mole or by total weight of the composition, 20-40% cholesterol by mole or by total weight of the composition, and 5 to 10% non-cationic lipid, by mole or by total weight of the composition and 1-10% conjugated lipid by mole or by total weight of the composition. The composition may contain 60-70% ionizable lipid by mole or by total weight of the composition, 25-35% cholesterol by mole or by total weight of the composition, and 5-10% non-cationic lipid by mole or by total weight of the composition. The composition may also contain up to 90% ionizable lipid by mole or by total weight of the composition and 2 to 15% non-cationic lipid by mole or by total weight of the composition. The formulation may also be a lipid nanoparticle formulation, for example including 8-30% ionizable lipid by mole or by total weight of the composition, 5-30% non-cationic lipid by mole or by total weight of the composition, and 0-20% cholesterol by mole or by total weight of the composition; 4-25% ionizable lipid by mole or by total weight of the composition, 4-25% non-cationic lipid by mole or by total weight of the composition, 2 to 25% cholesterol by mole or by total weight of the composition, 10 to 35% conjugate lipid by mole or by total weight of the composition, and 5% cholesterol by mole or by total weight of the composition; or 2-30% ionizable lipid by mole or by total weight of the composition, 2-30% non-cationic lipid by mole or by total weight of the composition, 1 to 15% cholesterol by mole or by total weight of the composition, 2 to 35% conjugate lipid by mole or by total weight of the composition, and 1-20% cholesterol by mole or by total weight of the composition; or even up to 90% ionizable lipid by mole or by total weight of the composition and 2-10% non-cationic lipids by mole or by total weight of the composition, or even 100% cationic lipid by mole or by total weight of the composition. In some embodiments, the lipid particle formulation includes ionizable lipid, phospholipid, cholesterol and a PEG-ylated lipid in a molar ratio of 50:10:38.5:1.5. In some other embodiments, the lipid particle formulation includes ionizable lipid, cholesterol and a PEG-ylated lipid in a molar ratio of 60:38.5:1.5.

[0576] In some embodiments, the lipid particle includes ionizable lipid, non-cationic lipid (e.g., phospholipid), a sterol (e.g., cholesterol) and a PEG-ylated lipid, where the molar ratio of lipids ranges from 20 to 70 mole percent for the ionizable lipid, with a target of 40-60, the mole percent of non-cationic lipid ranges from 0 to 30, with a target of 0 to 15, the mole percent of sterol ranges from 20 to 70, with a target of 30 to 50, and the mole percent of PEG-ylated lipid ranges from 1 to 6, with a target of 2 to 5.

[0577] In some embodiments, the lipid particle includes ionizable lipid/non-cationic-lipid/sterol/conjugated lipid at a molar ratio of 50:10:38.5:1.5.

[0578] In an aspect, the disclosure provides a lipid nanoparticle formulation including phospholipids, lecithin, phosphatidylcholine and phosphatidylethanolamine.

[0579] In some embodiments, one or more additional compounds can also be included. Those compounds can be administered separately, or the additional compounds can be included in the lipid nanoparticles of the invention. In other words, the lipid nanoparticles can contain other compounds in addition to the nucleic acid or at least a second nucleic acid, different than the first. Without limitations, other additional compounds can be selected from the group consisting of small or large organic or inorganic molecules, monosaccharides, disaccharides, trisaccharides, oligosaccharides, polysaccharides, peptides, proteins, peptide analogs and derivatives thereof, peptidomimetics, nucleic acids, nucleic acid analogs and derivatives, an extract made from biological materials, or any combinations thereof.

[0580] In some embodiments, the LNPs include biodegradable, ionizable lipids. In some embodiments, the LNPs include (9Z,12Z)-3-((4,4-bis(octyloxy)butanoyl)oxy)-2-((((3-(diethylamino)propoxy)carbonyl)oxy)methyl)propyl octadeca-9,12-dienoate, also called 3-((4,4-bis(octyloxy)butanoyl)oxy)-2-((((3-(diethylamino)propoxy)carbonyl)oxy)methyl)propyl (9Z,12Z)-octadeca-9,12-dienoate) or another ionizable lipid. See, e.g., lipids of WO2019/067992, WO/2017/173054, WO2015/095340, and WO2014/136086, as well as references provided therein. In some embodiments, the term cationic and ionizable in the context of LNP lipids is interchangeable, e.g., wherein ionizable lipids are cationic depending on the pH.

[0581] In some embodiments, the average LNP diameter of the LNP formulation may be between 10s of nm and 100s of nm, e.g., measured by dynamic light scattering (DLS). In some embodiments, the average LNP diameter of the LNP formulation may be from about 40 nm to about 150 nm, such as about 40 nm, 45 nm, 50 nm, 55 nm, 60 nm, 65 nm, 70 nm, 75 nm, 80 nm, 85 nm, 90 nm, 95 nm, 100 nm, 105 nm, 110 nm, 115 nm, 120 nm, 125 nm, 130 nm, 135 nm, 140 nm, 145 nm, or 150 nm. In some embodiments, the average LNP diameter of the LNP formulation may be from about 50 nm to about 100 nm, from about 50 nm to about 90 nm, from about 50 nm to about 80 nm, from about 50 nm to about 70 nm, from about 50 nm to about 60 nm, from about 60 nm to about 100 nm, from about 60 nm to about 90 nm, from about 60 nm to about 80 nm, from about 60 nm to about 70 nm, from about 70 nm to about 100 nm, from about 70 nm to about 90 nm, from about 70 nm to about 80 nm, from about 80 nm to about 100 nm, from about 80 nm to about 90 nm, or from about 90 nm to about 100 nm. In some embodiments, the average LNP diameter of the LNP formulation may be from about 70 nm to about 100 nm. In a particular embodiment, the average LNP diameter of the LNP formulation may be about 80 nm. In some embodiments, the average LNP diameter of the LNP formulation may be about 100 nm. In some embodiments, the average LNP diameter of the LNP formulation ranges from about I mm to about 500 mm, from about 5 mm to about 200 mm, from about 10 mm to about 100 mm, from about 20 mm to about 80 mm, from about 25 mm to about 60 mm, from about 30 mm to about 55 mm, from about 35 mm to about 50 mm, or from about 38 mm to about 42 mm.

[0582] An LNP may, in some instances, be relatively homogenous. A polydispersity index may be used to indicate the homogeneity of an LNP, e.g., the particle size distribution of the lipid nanoparticles. A small (e.g., less than 0.3) polydispersity index generally indicates a narrow particle size distribution. An LNP may have a polydispersity index from about 0 to about 0.25, such as 0.01, 0.02, 0.03, 0.04, 0.05, 0.06, 0.07, 0.08, 0.09, 0.10, 0.11, 0.12, 0.13, 0.14, 0.15, 0.16, 0.17, 0.18, 0.19, 0.20, 0.21, 0.22, 0.23, 0.24, or 0.25. In some embodiments, the polydispersity index of an LNP may be from about 0.10 to about 0.20.

[0583] The zeta potential of an LNP may be used to indicate the electrokinetic potential of the composition. In some embodiments, the zeta potential may describe the surface charge of an LNP. Lipid nanoparticles with relatively low charges, positive or negative, are generally desirable, as more highly charged species may interact undesirably with cells, tissues, and other elements in the body. In some embodiments, the zeta potential of an LNP may be from about −10 mV to about +20 mV, from about −10 mV to about +15 mV, from about −10 mV to about +10 mV, from about −10 mV to about +5 mV, from about −10 mV to about 0 mV, from about −10 mV to about −5 mV, from about −5 mV to about +20 mV, from about −5 mV to about +15 mV, from about −5 mV to about +10 mV, from about −5 mV to about +5 mV, from about −5 mV to about 0 mV, from about 0 mV to about +20 mV, from about 0 mV to about +15 mV, from about 0 mV to about +10 mV, from about 0 mV to about +5 mV, from about +5 mV to about +20 mV, from about +5 mV to about +15 mV, or from about +5 mV to about +10 mV.

[0584] The efficiency of encapsulation of a protein and/or nucleic acid, describes the amount of protein and/or nucleic acid that is encapsulated or otherwise associated with an LNP after preparation, relative to the initial amount provided. The encapsulation efficiency is desirably high (e.g., close to 100%). The encapsulation efficiency may be measured, for example, by comparing the amount of protein or nucleic acid in a solution containing the lipid nanoparticle before and after breaking up the lipid nanoparticle with one or more organic solvents or detergents. An anion exchange resin may be used to measure the amount of free protein or nucleic acid (e.g., RNA) in a solution. Fluorescence may be used to measure the amount of free protein and/or nucleic acid (e.g., RNA) in a solution. For the lipid nanoparticles described herein, the encapsulation efficiency of a protein and/or nucleic acid may be at least 50%, for example 50%, 55%, 60%, 65%, 70%, 75%, 80%, 85%, 90%, 91%, 92%, 93%, 94%, 95%, 96%, 97%, 98%, 99%, or 100%. In some embodiments, the encapsulation efficiency may be at least 80%. In some embodiments, the encapsulation efficiency may be at least 90%. In some embodiments, the encapsulation efficiency may be at least 95%.

[0585] An LNP may optionally include one or more coatings. In some embodiments, an LNP may be formulated in a capsule, film, or tablet having a coating. A capsule, film, or tablet including a composition described herein may have any useful size, tensile strength, hardness, or density.

[0586] Additional exemplary lipids, formulations, methods, and characterization of LNPs are taught by WO2020/061457, WO2021/113777, and WO2021226597, each of which is incorporated herein by reference in its entirety. Further exemplary lipids, formulations, methods, and characterization of LNPs are taught by Hou et al. Lipid nanoparticles for mRNA delivery. Nat Rev Mater (2021). doi.org/10.1038/s41578-021-00358-0, which is incorporated herein by reference in its entirety (see, for example, exemplary lipids and lipid derivatives of FIG. 2 of Hou et al.).

[0587] In some embodiments, in vitro or ex vivo cell lipofections are performed using Lipofectamine MessengerMax (Thermo Fisher) or TranslT-mRNA Transfection Reagent (Mirus Bio). In certain embodiments, LNPs are formulated using the GenVoy_ILM ionizable lipid mix (Precision NanoSystems). In certain embodiments, LNPs are formulated using 2,2-dilinoleyl-4-dimethylaminoethyl-[1,3]-dioxolane (DLin-KC2-DMA) or dilinoleylmethyl-4-dimethylaminobutyrate (DLin-MC3-DMA or MC3), the formulation and in vivo use of which are taught in Jayaraman et al. ANGEW CHEM INT ED ENGL 51(34):8529-8533 (2012), incorporated herein by reference in its entirety.

[0588] LNP formulations optimized for the delivery of CRISPR-Cas systems, e.g., Cas9-gRNA RNP, gRNA, Cas9 mRNA, are described in WO2019067992 and WO2019067910, both incorporated by reference, and are useful for delivery of circular polyribonucleotides and linear polyribonucleotides described herein.

[0589] Additional specific LNP formulations useful for delivery of nucleic acids (e.g., circular polyribonucleotides, linear polyribonucleotides) are described in U.S. Pat. Nos. 8,158,601 and 8,168,775, both incorporated by reference, which include formulations used in patisiran, sold under the name ONPATTRO.

[0590] In embodiments, a polyribonucleotide (e.g., a circular polyribonucleotide, a linear polyribonucleotide) encoding at least a portion (e.g., an antigenic portion) of an immunogen or polypeptide described herein is formulated in an LNP, wherein: (a) the LNPs comprise a cationic lipid, a neutral lipid, a cholesterol, and a PEG lipid, (b) the LNPs have a mean particle size of between 80 nm and 160 nm, and (c) the polyribonucleotide comprises: (i) a 5′-cap structure; (ii) a 5′-UTR; (iii) N1-methyl-pseudouridine, cytosine, adenine, and guanine; (iv) a 3′-UTR; and (v) a poly-A region. In embodiments, the polyribonucleotide (e.g., circular polyribonucleotide, linear polyribonucleotide) formulated in an LNP is a vaccine.

[0591] Exemplary dosing of polyribonucleotide (e.g., a circular polyribonucleotide, a linear polyribonucleotide) LNP may include about 0.1, 0.25, 0.3, 0.5, 1, 2, 3, 4, 5, 6, 8, 10, or 100 mg/kg (RNA).

[0592] In some embodiments, a dose of a polyribonucleotide (e.g., a circular polyribonucleotide, a linear polyribonucleotide) immunogenic composition described herein is between 30-200 mcg, e.g., 30 mcg, 50 mcg, 75 mcg, 100 mcg, 150 mcg, or 200 mcg. Exemplary dosing of AAV including a polyribonucleotide (e.g., a circular polyribonucleotide, a linear polyribonucleotide) may include an MOI of about 10¹¹, 10¹², 10¹³, and 10¹⁴ vg/kg.

### Therapeutics Methods

[0593] The disclosure provides compositions and methods that are useful as treatments or prophylactics, for example, compositions and methods that comprise antibodies that can be used to protect a subject (e.g., the subject for immunization or the subject for treatment) against the effects of a coronavirus infection. For example, a circular polyribonucleotide of the disclosure can be administered to a subject (e.g., a subject for immunization) to stimulate production of antibodies (e.g., human polyclonal antibodies) that bind to desired coronavirus immunogens/and or epitopes. A linear polyribonucleotide of the disclosure can be administered to a subject (e.g., a subject for immunization) to stimulate production of antibodies (e.g., human polyclonal antibodies) that bind to desired coronavirus immunogens/and or epitopes. The antibodies can be obtained from the subject (e.g., after immunization of the subject for immunization) and formulated for administration to a subject (e.g., a subject for treatment, such as a human subject for treatment), for example, as a treatment or prophylactic. The antibodies can provide protection against, for example, a coronavirus that expresses the immunogens and/or epitopes. In another example, a circular polyribonucleotide can be administered to a human subject (e.g., a human subject for immunization) to stimulate production of antibodies in the human subject that bind to desired immunogens/and or epitopes. In another example, a linear polyribonucleotide can be administered to a human subject (e.g., a human subject for immunization) to stimulate production of antibodies in the human subject that bind to desired immunogens/and or epitopes. In some embodiments, the disclosure provides compositions for use in treating or prophylaxis of a coronavirus infection.

[0594] Non-limiting examples of conditions and diseases that can be treated by compositions and methods of the disclosure include those caused by or associated with a coronavirus disclosed herein, for example coronavirus infections. In some embodiments, a condition is caused by or associated with a SARS-CoV. In some embodiments, a condition is caused by or associated with SARS-CoV-2. In some embodiments, a condition is coronavirus disease of 2019 (COVID-19). In some embodiments, a condition is caused by or associated with MERS-CoV.

[0595] In some embodiments, the polyclonal antibodies are produced by immunizing a non-human animal or human subject (e.g., a non-human animal or human subject for immunization) with a circular polyribonucleotide of the disclosure, plasma are collected from the non-human animal or human subject (e.g., after immunization of the non-human animal or human subject for immunization), and polyclonal antibodies are purified from the plasma. In some embodiments, the polyclonal antibodies are produced by immunizing a non-human animal or human subject (e.g., a non-human animal or human subject for immunization) with a linear polyribonucleotide of the disclosure, plasma are collected from the non-human animal or human subject (e.g., after immunization of the non-human animal or human subject for immunization), and polyclonal antibodies are purified from the plasma. Optionally, purified polyclonal antibodies from more than one non-human animal or human subject (e.g., after immunization of the more than one non-human animal or human subject for immunization), multiple purified polyclonal antibody samples from the same non-human animal or human subject (e.g., after immunization of the non-human animal or human subject for immunization), or a combination thereof, are pooled together and administered to a subject (e.g., a subject for treatment) in need thereof, e.g., a human subject (e.g., a human subject for treatment) in need thereof. In some embodiments, the polyclonal antibodies are formulated in a polyclonal antibody preparation, e.g., a polyclonal antibody preparation against a coronavirus. A method of producing a human polyclonal antibody preparation against a coronavirus comprising (a) administering to an animal (e.g., an animal for immunization) capable of producing antibodies an immunogenic composition comprising a polyribonucleotide (e.g., a circular polyribonucleotide or a linear polyribonucleotide) that comprises a sequence encoding a coronavirus immunogen, (b) collecting blood or plasma from the mammal, (c) purifying polyclonal antibodies against the coronavirus from the blood or plasma, and (d) formulating polyclonal antibodies as a therapeutic or pharmaceutical preparation for human use (e.g., administration to a human subject for treatment) or a veterinarian preparation for non-human animal use (e.g., administration to a non-human animal subject for treatment).

[0596] In some embodiments, the method further comprises monitoring the subject (e.g., the subject for treatment) having a coronavirus infection, the subject (e.g., the subject for treatment) at risk for exposure to a coronavirus infection, or the subject (e.g., the subject for treatment) in need thereof for the presence of the polyclonal antibodies for the coronavirus immunogen. In some embodiments, the monitoring is prior to administration of the polyclonal antibodies and/or after the administration of the polyclonal antibodies.

[0597] In practicing the methods of treatment or use provided herein, therapeutically effective amounts of the compounds (e.g., agents, such as a circular polyribonucleotide or antibody) described herein are administered in pharmaceutical compositions to a subject (e.g., the subject for immunization or the subject for treatment) having a disease or condition to be treated or requiring prophylaxis. In practicing the methods of treatment or use provided herein, therapeutically effective amounts of the compounds (e.g., agents, such as a linear polyribonucleotide or antibody) described herein are administered in pharmaceutical compositions to a subject (e.g., the subject for immunization or the subject for treatment) having a disease or condition to be treated or requiring prophylaxis. In some embodiments, the subject (e.g., the subject for immunization or the subject for treatment) is a mammal such as a human. A therapeutically effective amount can vary widely depending on the severity of the disease, the age and relative health of the subject (e.g., the subject for immunization or the subject for treatment), the potency of the compounds used, characteristics of a given coronavirus, and other factors.

### Methods and Routes of Administering

[0598] A composition (e.g., a pharmaceutical composition) disclosed herein can be administered in a therapeutically effective amount by various forms and routes including, for example, oral, or topical administration. In some embodiments, a composition can be administered by parenteral, intravenous, subcutaneous, intramuscular, intradermal, intraperitoneal, intracerebral, subarachnoid, intraocular, intrasternal, ophthalmic, endothelial, local, intranasal, intrapulmonary, rectal, intraarterial, intrathecal, inhalation, intralesional, intradermal, epidural, intracapsular, subcapsular, intracardiac, transtracheal, subcuticular, subarachnoid, or intraspinal administration, e.g., injection or infusion. In some embodiments, a composition can be administered by absorption through epithelial or mucocutaneous linings (e.g., oral mucosa, rectal and intestinal mucosa administration). In some embodiments, the composition is delivered via multiple administration routes.

[0599] In some embodiments, the composition is administered by intravenous infusion. In some embodiments, the composition is administered by slow continuous infusion over a long period, such as more than 24 hours. In some embodiments, the composition is administered as an intravenous injection or a short infusion.

[0600] A pharmaceutical composition can be administered in a local manner, for example, via injection of the agent directly into an organ, optionally in a depot or sustained release formulation or implant. A pharmaceutical composition can be provided in the form of a rapid release formulation, in the form of an extended-release formulation, or in the form of an intermediate release formulation. A rapid release form can provide an immediate release. An extended-release formulation can provide a controlled release or a sustained delayed release. In some embodiments, a pump can be used for delivery of the pharmaceutical composition. In some embodiments, a pen delivery device can be used, for example, for subcutaneous delivery of a composition of the disclosure.

[0601] A pharmaceutical composition provided herein can be administered in conjunction with other therapies, for example, an antiviral therapy, an antibiotic, a cell therapy, a cytokine therapy, or an anti-inflammatory agent. In some embodiments, a circular polyribonucleotide or antibody described herein can be used singly or in combination with one or more therapeutic agents as a component of mixtures. In some embodiments, a linear polyribonucleotide or antibody described herein can be used singly or in combination with one or more therapeutic agents as a component of mixtures.

### Doses and Frequency

[0602] Therapeutic agents described herein can be administered before, during, or after the occurrence of a disease or condition, and the timing of administering the composition containing a therapeutic agent can vary. In some cases, the compositions can be used as a prophylactic and can be administered continuously to subjects (e.g., the subject for immunization or the subject for treatment) with a susceptibility to a coronavirus or a propensity to a condition or disease associated with a coronavirus. Prophylactic administration can lessen the likelihood of the occurrence of the infection, disease, or condition, or can reduce the severity of the infection, disease or condition.

[0603] The compositions can be administered to a subject (e.g., the subject for immunization or the subject for treatment) after (e.g., as soon as possible after) the onset of the symptoms. The compositions can be administered to a subject (e.g., the subject for immunization or the subject for treatment) after (e.g., as soon as possible after) a test result, for example, a test result that provides a diagnosis, a test that shows the presence of a coronavirus in a subject (e.g., the subject for immunization or the subject for treatment), or a test showing progress of a condition, e.g., a decreased blood oxygen levels. A therapeutic agent can be administered after (e.g., as soon as is practicable after) the onset of a disease or condition is detected or suspected. A therapeutic agent can be administered after (e.g., as soon as is practicable after) a potential exposure to a coronavirus, for example, after a subject (e.g., the subject for immunization or the subject for treatment) has contact with an infected subject or learns they had contact with an infected subject that may be contagious.

[0604] A circular polyribonucleotide, antibody, or therapeutic agent described herein are administered at any interval desired. A linear polyribonucleotide, antibody, or therapeutic agent described herein are administered at any interval desired.

[0605] Actual dosage levels of an agent of the disclosure (e.g., circular polyribonucleotide, linear polyribonucleotide, antibody, or therapeutic agent) may be varied so as to obtain an amount of the agent to achieve the desired therapeutic response for a particular subject, composition, and mode of administration, without being toxic to the subject (e.g., the subject for immunization or the subject for treatment). The selected dosage level can depend upon a variety of pharmacokinetic factors including the activity of the particular compositions of the present invention employed, the route of administration, the time of administration, the rate of excretion, the duration of the treatment, other drugs, compounds and/or materials used in combination with the particular compositions employed, the age, sex, weight, condition, general health and prior medical history of the patient being treated, and like factors well known in the medical arts.

[0606] Dosage regimens may be adjusted to provide the optimum desired response (e.g., a therapeutic and/or prophylactic response). For example, a single bolus may be administered, several divided doses may be administered over time, or the dose may be proportionally reduced or increased as indicated by the exigencies of the therapeutic situation. It is especially advantageous to formulate parenteral compositions in dosage unit form for ease of administration and uniformity of dosage. Dosage unit form as used herein refers to physically discrete units suited as unitary dosages for the subjects (e.g., the subjects for immunization or the subjects for treatment); each unit contains a predetermined quantity of active agent calculated to produce the desired therapeutic effect in association with the required pharmaceutical carrier. The specification for the dosage unit forms of the disclosure can be determined by and directly dependent on (a) the unique characteristics of the active agent and the particular therapeutic effect to be achieved, and (b) the limitations inherent in the art of compounding such an active agent for the treatment of sensitivity in individuals. A dose can be determined by reference to a plasma concentration or a local concentration of the circular polyribonucleotide or antibody. A dose can be determined by reference to a plasma concentration or a local concentration of the linear polyribonucleotide or antibody.

[0607] A pharmaceutical composition described herein can be in a unit dosage form suitable for a single administration of a precise dosage. In unit dosage form, the formulation can be divided into unit doses containing appropriate quantities of one or more circular polyribonucleotides, antibodies, and/or therapeutic agents. In unit dosage form, the formulation can be divided into unit doses containing appropriate quantities of one or more linear polyribonucleotides, antibodies, and/or therapeutic agents. The unit dosage can be in the form of a package containing discrete quantities of the formulation. Non-limiting examples are packaged injectables, vials, and ampoules. An aqueous suspension composition disclosed herein can be packaged in a single-dose non-reclosable container. Multiple-dose reclosable containers can be used, for example, in combination with or without a preservative. A formulation for injection disclosed herein can be present in a unit dosage form, for example, in ampoules, or in multi dose containers with a preservative.

[0608] A dose can be based on the amount of the agent per kilogram of body weight of a subject (e.g., the subject for immunization or the subject for treatment). A dose of an agent (e.g., antibody) is in the range of 10-3000 mg/kg, e.g., 100-2000 mg/kg, e.g., 300-500 mg/kg/day for 1-10 or 1-5 days; e.g., 400 mg/kg/day for 3-6 days; e.g., 1 g/kg/d for 2-3 days.

### Subjects

[0609] A composition is provided for use in treatment or prophylaxis of a condition disclosed herein, such as an infection with a coronavirus. The composition can be administered to a subject (e.g., the subject for immunization or the subject for treatment) that has a coronavirus infection or an associated disease or condition. The composition can be administered as a prophylactic to subjects (e.g., subjects for immunization or subjects for treatment) with a propensity for coronavirus infection or a susceptibility to an associated condition or disease in order to lessen a likelihood of the infection, disease or condition, or to reduce the severity of the infection, disease or condition.

[0610] A subject (e.g., the subject for immunization or the subject for treatment) can be a subject that is infected with a coronavirus. A subject (e.g., the subject for immunization or the subject for treatment) can be a subject that tested positive for the coronavirus. A subject (e.g., the subject for immunization or the subject for treatment) can be a subject that has been exposed to a coronavirus. A subject (e.g., the subject for immunization or the subject for treatment) can be a subject that has potentially been exposed to a coronavirus. A subject (e.g., the subject for immunization or the subject for treatment) can be a subject that is exhibiting one or more signs and/or symptoms consistent with infection with a coronavirus.

[0611] In some embodiments, a subject (e.g., the subject for immunization or the subject for treatment) is a subject that is at high risk of coming into contact with a coronavirus of the disclosure. For example, a subject (e.g., the subject for immunization or the subject for treatment) may be a health care worker, a laboratory worker, or a first responder that is more likely to come into contact with a coronavirus (e.g., SARS-CoV2) of the disclosure. A subject (e.g., the subject for immunization or the subject for treatment) may work at a health care facility, e.g., a hospital, doctor's surgery, inpatient facility, outpatient facility, urgent care facility, retirement home, aged care facility, or nursing home.

[0612] In some embodiments, a subject (e.g., the subject for immunization or the subject for treatment) is a subject that is at high risk of complications if infected with a coronavirus of the disclosure. For example, a subject (e.g., the subject for immunization or the subject for treatment) can have a co-morbidity, an age over 50, type 1 diabetes mellitus, type 2 diabetes mellitus, insulin resistance, or a combination thereof. In some embodiments, a subject is an immunocompromised subject. In some embodiments, a subject (e.g., the subject for immunization or the subject for treatment) is on immunosuppressive drugs. In some embodiments, a subject (e.g., the subject for immunization or the subject for treatment) is a transplant recipient that is on immunosuppressive drugs. In some embodiments, a subject (e.g., the subject for immunization or the subject for treatment) is undergoing therapy for cancer, e.g., chemotherapy, that may decrease the function of the immune system.

[0613] A subject (e.g., the subject for immunization or the subject for treatment) can be a mammal. A subject (e.g., the subject for immunization or the subject for treatment) can be a human. A subject (e.g., the subject for immunization or the subject for treatment) can be a non-human animal. The non-human animal can be an agricultural animal, e.g., a cow, pig, sheep, horse, or goat; a pet, e.g., a cat or dog; or a zoo animal, e.g., a feline.

### Kits

[0614] In some aspects, the disclosure provides a kit. In some embodiments, the kit includes (a) a circular polyribonucleotide, an immunogenic composition, or a pharmaceutical composition described herein, and, optionally (b) informational material. In some embodiments, the kit further comprises an adjuvant described herein, which may be provided in a separate composition to be administered in combination with the circular polyribonucleotide, an immunogenic composition, or a pharmaceutical composition as part of a defined dosing regimen. The informational material may be descriptive, instructional, marketing, or other material that relates to the methods described herein and/or the use of the pharmaceutical composition or circular polyribonucleotide for the methods described herein. The pharmaceutical composition or circular polyribonucleotide may comprise material for a single administration (e.g., single dosage form), or may comprise material for multiple administrations (e.g., a “multidose” kit).

[0615] The informational material of the kits is not limited in its form. In one embodiment, the informational material may include information about production of the pharmaceutical composition, the pharmaceutical drug substance, or the pharmaceutical drug product, molecular weight of the pharmaceutical composition, the pharmaceutical drug substance, or the pharmaceutical drug product, concentration, date of expiration, batch, or production site information, and so forth. In one embodiment, the informational material relates to methods for administering a dosage form of the pharmaceutical composition. In one embodiment, the informational material relates to methods for administering a dosage form of the circular polyribonucleotide.

[0616] In addition to a dosage form of the pharmaceutical composition and circular polyribonucleotide described herein, the kit may include other ingredients, such as a solvent or buffer, a stabilizer, a preservative, a flavoring agent (e.g., a bitter antagonist or a sweetener), a fragrance, a dye or coloring agent, for example, to tint or color one or more components in the kit, or other cosmetic ingredient, and/or a second agent for treating a condition or disorder described herein. Alternatively, the other ingredients may be included in the kit, but in different compositions or containers than a pharmaceutical composition or circular polyribonucleotide described herein. In such embodiments, the kit may include instructions for admixing a pharmaceutical composition or nucleic acid molecule (e.g., a circular polyribonucleotide) described herein and the other ingredients, or for using a pharmaceutical composition or nucleic acid molecule (e.g., a circular polyribonucleotide) described herein together with the other ingredients.

[0617] In some embodiments, the components of the kit are stored under inert conditions (e.g., under Nitrogen or another inert gas such as Argon). In some embodiments, the components of the kit are stored under anhydrous conditions (e.g., with a desiccant). In some embodiments, the components are stored in a light blocking container such as an amber vial.

[0618] A dosage form of a pharmaceutical composition or nucleic acid molecule (e.g., a circular polyribonucleotide) described herein may be provided in any form, e.g., liquid, dried or lyophilized form. It is preferred that a pharmaceutical composition or nucleic acid molecule (e.g., a circular polyribonucleotide) described herein be substantially pure and/or sterile. When a pharmaceutical composition or nucleic acid molecule (e.g., a circular polyribonucleotide) described herein is provided in a liquid solution, the liquid solution preferably is an aqueous solution, with a sterile aqueous solution being preferred. When a pharmaceutical composition or nucleic acid molecule (e.g., a circular polyribonucleotide) described herein is provided as a dried form, reconstitution generally is by the addition of a suitable solvent. The solvent, e.g., sterile water or buffer, can optionally be provided in the kit.

[0619] The kit may include one or more containers for the composition containing a dosage form described herein. In some embodiments, the kit contains separate containers, dividers or compartments for the composition and informational material. For example, the pharmaceutical composition or circular polyribonucleotide may be contained in a bottle, vial, or syringe, and the informational material may be contained in a plastic sleeve or packet. In other embodiments, the separate elements of the kit are contained within a single, undivided container. For example, the dosage form of a pharmaceutical composition or nucleic acid molecule (e.g., a circular polyribonucleotide) described herein is contained in a bottle, vial or syringe that has attached thereto the informational material in the form of a label. In some embodiments, the kit includes a plurality (e.g., a pack) of individual containers, each containing one or more unit dosage forms of a pharmaceutical composition or circular polyribonucleotide described herein. For example, the kit includes a plurality of syringes, ampules, foil packets, or blister packs, each containing a single unit dose of a dosage form described herein.

[0620] The containers of the kits can be airtight, waterproof (e.g., impermeable to changes in moisture or evaporation), and/or light tight.

[0621] The kit optionally includes a device suitable for use of the dosage form, e.g., a syringe, pipette, forceps, measured spoon, swab (e.g., a cotton swab or wooden swab), or any such device.

[0622] The kits of the invention may include dosage forms of varying strengths to provide a subject with doses suitable for one or more of the initiation phase regimens, induction phase regimens, or maintenance phase regimens described herein. Alternatively, the kit may include a scored tablet to allow the user to administered divided doses, as needed.

### EXAMPLES

[0623] The following examples are included for illustrative purposes only and are not intended to limit the scope of the invention.

### Example 1: Circular RNA Constructs

[0624] This example describes design of novel SARS-CoV-2 open reading frames (ORFs) and circRNA constructs.

[0625] In this Example, SARS-CoV-2 ORFs and circular RNA constructs encoding SARS-CoV-2 ORFs were designed as described in TABLE 2.

### Example 2: In Vitro Production of Circular RNAs Encoding SARS-CoV-2 Immunogens

[0626] This example demonstrates in vitro production of circular RNAs.

[0627] Circular RNAs were designed to include an IRES, an ORF encoding a modified SARS-CoV-2 spike immunogen or RBD immunogen (as described in Example 1), and two spacer elements flanking the IRES-ORF. Circularization enables rolling circle translation, multiple ORFs with alternating stagger elements for discrete ORF expression and controlled protein stoichiometry, and an IRES that targets RNA for ribosomal entry. Exemplary drawings of circular polyribonucleotide comprising a sequence encoding a coronavirus immunogen is shown in FIGS. 1 and 3-5.

[0628] In this Example, circular RNAs were generated as follows. Unmodified linear RNA was synthesized by in vitro transcription using T7 RNA polymerase from a DNA segment. Transcribed RNA was purified with an RNA purification system (New England Biolabs, Inc.), treated with RNA 5′phosphohydrolase (RppH) (New England Biolabs, M0356) following the manufacturer's instructions, and purified again with the RNA purification system. RppH-treated linear RNA was circularized using a splint DNA. Alternately or in addition to treatment with 5′RppH, the RNA was transcribed under conditions with excess GMP over GTP.

[0629] Splint-ligation was performed as follows: circular RNA was generated by treatment of the transcribed linear RNA and a DNA splint (5′-GTTTTTCGGCTATTCCCAATAGCCGTTTTG-3′) (SEQ ID NO: 47) using T4 DNA ligase 1 (New England Bio, Inc., M0437M). To purify the circular RNAs, ligation mixtures were resolved on 4% denaturing PAGE and RNA corresponding to each of the circular RNAs were excised. Excised RNA gel fragments were crushed, and RNA was eluted with gel elution buffer (0.5 M Sodium Acetate, 0.1% SDS, 1 mM EDTA) for one hour at 37° C. The eluted buffer was harvested, and RNA was eluted again by adding gel elution buffer to the crushed gel and incubated for one hour. Gel debris was removed by centrifuge filters and RNA was precipitated with ethanol. Agarose gel electrophoresis was used as a quality control measurement for validating purity and circularization. Additionally, or alternatively, the circular RNAs were purified using column chromatography.

### Example 3: MRNA Constructs

[0630] This example describes design of novel mRNA constructs encoding SARS-CoV-2 ORFs.

[0631] In this Example, linear RNA constructs encoding SARS-CoV-2 ORFs were designed as described in Table 6.

### Example 4: In Vitro Production of mRNAs Encoding SARS-CoV-2 Immunogens

[0632] This example demonstrates in vitro production of mRNAs.

[0633] In this Example, mRNA was designed with an ORF encoding a modified SARS-CoV-2 spike immunogen or RBD as described in Example 3.

[0634] In this Example, modified mRNA was made by in vitro transcription. RNA was fully substituted with Pseudo-Uridine and 5-Methyl-C, capped with CleanCap™ AG, included 5′ and 3′ human alpha-globin UTRs, and was polyadenylated. mRNA was Urea-PAGE purified, eluted in a buffer (0.5 M Sodium Acetate, 0.1% SDS, 1 mM EDTA), ethanol precipitated and resuspended in RNA storage solution (ThermoFisher Scientific, cat #AM7000). Agarose gel electrophoresis was used as a quality control measurement for validating purity and circularization.

### Example 5: Expression of Non-Secreted SARS-CoV-2 Immunogen from RNA in Mammalian Cells

[0635] In this Example, circular RNA or mRNA encoding SARS-CoV-2 spike immunogens were designed and produced and purified by the methods described herein. Circular RNAs and mRNAs are formulated in MessengerMax and 0.1 picomoles of circular RNA is transfected into HEK293 cells (10 000 cells per well) according to the manufacturer's instructions.

[0636] Spike immunogen expression is measured using a SARS-CoV-2 spike immunogen-specific ELISA at 24, 48, and 72 hours. To measure expression, cells are lysed in each well at the appropriate timepoint, using a lysis buffer and a protease inhibitor. The cell lysate is retrieved and centrifuged at 12,000 rpm for 10 minutes. Supernatant is collected. In this example, a SARS-CoV-2 2019 spike immunogen detection sandwich ELISA kit is used (SARS-CoV-2 (2019-nCoV) Spike Detection ELISA Kit, Sino Biological, KIT40591) according to the manufacturer's instructions.

### Example 6: Administration of RNA Encoding SARS-CoV-2 Immunogens to a Human Subject

[0637] This example describes the administration of a circular RNA encoding a SARS-CoV-2 immunogen to a human subject.

[0638] In this Example, circular RNA or mRNA encoding SARS-CoV-2 immunogens were designed and produced and purified by the methods described herein.

[0639] In this example, in one approach, RNA is formulated (with a lipid carrier (e.g., TransiT), formulated with a cationic polymer (e.g., protamine), formulated with a lipid nanoparticle, or unformulated), to obtain a first set of circular RNA preparations or a first set of linear RNA preparations. In a second approach, Addavax™ adjuvant (Invivogen), MF59® adjuvant, or complete Freund's adjuvant, is formulated with the RNA-lipid carrier mixture or the unformulated RNA preparation (e.g., circular RNA preparation or linear RNA preparation), as described in Beigel J H et al. (Lancet Infect. Dis., 18: 410-418 (2018)), to obtain a second set of circular RNA preparations or a second set of linear RNA preparations. Circular RNA or linear RNA is formulated to obtain the circular RNA preparations or linear RNA preparations shortly before injection into the human subject.

[0640] In this example, a human subject is immunized with the circular RNA preparations (i.e., a first circular RNA preparation or a second circular RNA preparation), linear RNA preparations (i.e., a first circular RNA preparation or a second circular RNA preparation) via intramuscular or intradermal injection. The circular RNA preparations or linear RNA preparations are administered to the human subject at least one time, at least two times, at least 3 times, or more to elicit an immunogenic response in the human subject.

### Example 7: Expression of Multiple Immunogens from Circular RNAs in Mammalian Cells

[0641] This example demonstrates expression of multiple immunogens from circular RNAs in mammalian cells. An exemplary schematic of these constructs is shown in FIG. 5.

### Experiment 1

[0642] A first circular RNA encoding a SARS-CoV-2 RBD immunogen (Nucleic acid SEQ ID NO: 56; Amino acid SEQ ID NO: 55) was designed and produced and purified by the methods described herein. A second circular RNA encoding a SARS-CoV-2 Spike immunogen (Nucleic acid SEQ ID NO: 54; Amino acid SEQ ID NO. 53) was designed and produced and purified by the methods described herein. The first circular RNA and the second circular RNA were mixed together to obtain a mixture. The mixture (1 picomoles of each of the circular RNAs) was transfected into HeLa cells (100,000 cells per well in a 24 well plate) using Lipofectamine MessengerMax (ThermoFisher, LMRNA015). As controls, the first circular RNA and the second circular RNA were also separately transfected into HeLa cells using MessengerMax.

[0643] RBD immunogen expression was measured at 24 hours using a SARS-CoV-2 RBD immunogen-specific ELISA. Spike immunogen expression was measured at 24 hours by flow cytometry.

[0644] From the transfection with the mixture, SARS-Co-V-2 RBD immunogen was detected in the HeLa cell supernatant and SARS-CoV-2 Spike immunogen was detected on the cell surface of the HeLa cells. From the transfection with the first circular RNA, SARS-CoV-2 RBD immunogen was detected, but SARS-CoV-2 Spike immunogen was not detected. From the transfection with the second circular RNA, SARS-CoV-2 Spike immunogen was detected, but SARS-CoV-2 RBD immunogen was not detected. This demonstrates that both SAR-CoV-2 RBD and SARS-CoV-2 Spike immunogens were expressed in mammalian cells from a combination mixture of circular RNAs.

### Experiment 2

[0645] A first circular RNA encoding a SARS-CoV-2 RBD immunogen (Nucleic acid SEQ ID NO: 56; Amino acid SEQ ID NO. 55) was designed and produced and purified by the methods described herein. A second circular RNA was designed with an IRES and ORF encoding Gaussia Luciferase (GLuc) (Nucleic acid SEQ ID NO: 58; Amino acid SEQ ID NO. 57) and produced and purified as described in Example 2. The first circular RNA and the second circular RNA were separately complexed with Lipofectamine MessengerMax (ThermoFisher, LMRNA015), and then mixed together to obtain a mixture. The mixture (0.1 picomoles of each circular RNAs) was transfected into HeLa cells (20,000 cells per well in a 96 well plate). As controls, the first circular RNA and the second circular RNA were also separately transfected into HeLa cells using MessengerMax.

[0646] RBD immunogen expression was measured at 24 hours using a SARS-CoV-2 RBD immunogen-specific ELISA. GLuc activity was measured at 24 hours using a Gaussia Luciferase activity assay (Thermo Scientific Pierce).

[0647] From the transfection with the mixture, SARS-CoV-2 RBD immunogen and GLuc activity were detected in the HeLa cell supernatant at 24 hrs. From the transfection with the first circular RNA, SARS-CoV-2 RBD immunogen was detected, but GLuc activity was not detected. From the transfection with the second circular RNA, GLuc activity was detected, but SARS-CoV-2 RBD immunogen was not detected.

[0648] This demonstrates that both SAR-CoV-2 RBD and GLuc immunogens were expressed in mammalian cells from a combination mixture of circular RNAs.

### Experiment 3

[0649] A first circular RNA encoding a SARS-CoV-2 RBD immunogen (Nucleic acid SEQ ID NO: 56; Amino acid SEQ ID NO. 55) was designed and produced and purified by the methods described herein. A second circular RNA was designed to include an IRES followed by an ORF encoding hemagglutinin (HA) from Influenza A H1N1, A/California/07/2009 (Nucleic acid SEQ ID NO: 60; Amino acid SEQ ID NO: 59) and produced and purified as described in Example 2. The first circular RNA and the second circular RNA were mixed together to obtain a mixture. The mixture (1 picomoles of each circular RNA) was transfected into HeLa cells (100,000 cells per well in a 24 well plate) using Lipofectamine MessengerMax (ThermoFisher, LMRNA015). As controls, the first circular RNA and the second circular RNA were also separately transfected into HeLa cells using MessengerMax.

[0650] RBD immunogen expression was measured at 24 hours using a SARS-CoV-2 RBD immunogen-specific ELISA. HA immunogen expression was measured at 24 hours using immunoblot. Briefly, for immunoblot, 24 hours after transfection, cells were lysed and Western blot was performed to detect the HA immunogen using Influenza A H1N1 HA (A/California/07/2009) monoclonal antibody (MA5-29920 (Thermo Fisher)) as the primary antibody and goat anti-mouse IgG H&L (HRP) as the secondary antibody (Abcam, ab 97023). For loading control alpha tubulin was used with alpha tubulin (DM1A) mouse antibody as the primary antibody (Cell Signaling Technology, CST #3873) and goat anti-mouse IgG H&L (HRP) as the secondary antibody (Abcam, ab 97023).

[0651] From the transfection with the mixture, both SARS-CoV-2 RBD and Influenza HA immunogens were detected. From the transfection with the first circular RNA, SARS-CoV-2 RBD was detected, but Influenza HA immunogen was not detected. From the transfection with the second circular RNA, Influenza HA immunogen was detected, but SARS-CoV-2 RBD immunogen was not detected. This demonstrates that both SAR-CoV-2 RBD and Influenza HA immunogens were expressed in mammalian cells from a combination mixture of circular RNAs.

### Experiment 4

[0652] A first circular RNA encoding a SARS-CoV-2 Spike immunogen (Nucleic acid SEQ ID NO: 45; Amino acid SEQ ID NO: 53) was designed and produced and purified by the methods described herein. A second circular RNA was designed to include an IRES followed by an ORF encoding HA from Influenza A H1N1, A/California/07/2009 (Nucleic acid SEQ ID NO: 60; Amino acid SEQ ID NO: 59) and produced and purified as described in Example 2. The first circular RNA and the second circular RNA were mixed together to obtain a mixture. The mixture (1 picomoles of each circular RNAs) was transfected into HeLa cells (100,000 cells per well in a 24 well plate) using Lipofectamine MessengerMax (ThermoFisher, LMRNA015). As controls, the first circular RNA and the second circular RNA were also separately transfected into HeLa cells using MessengerMax.

[0653] Spike immunogen expression was measured at 24 hours by flow cytometry. HA immunogen expression was measured at 24 hours by immunoblot as described above in Experiment 3.

[0654] From the transfection with the mixture, both SARS-CoV-2 Spike immunogen and Influenza HA immunogen were detected. From the transfection with the first circular RNA, SARS-CoV-2 Spike immunogen was detected, but Influenza HA immunogen was not detected. From the transfection with the second circular RNA, Influenza HA immunogen was detected, but SARS-CoV-2 Spike immunogen was not detected. This demonstrates that both SAR-CoV-2 Spike and Influenza HA immunogens were expressed in mammalian cells from a combination mixture of circular RNAs.

[0655] This Example shows that multiple immunogens were expressed in mammalian cells from circular RNA preparations comprising different combinations of circular RNAs.

### Example 8: Multi-Immunogen Expression from Circular RNA

[0656] This example demonstrates expression of multiple immunogens from a circular RNA in mammalian cells. Exemplary schematics of these constructs are shown in FIGS. 3 and 4.

### Experiment 1

[0657] In this Example, a circular RNA was designed to include an IRES followed by an ORF encoding a GLuc polypeptide, a stop codon, a spacer, an IRES, an ORF encoding a SARS-CoV-2 RBD immunogen, and a stop codon. The circular RNA was produced and purified as described in Example 2. As controls, the following circular RNAs were produced as described above: (i) a circular RNA with an IRES and ORF encoding a SARS-CoV-2 RBD immunogen; (ii) a circular RNA with an IRES and ORF encoding GLuc.

[0658] The circular RNAs (0.1 picomoles) were transfected into HeLa cells (10,000 cells per well in a 96 well plate) using Lipofectamine MessengerMax (ThermoFisher, LMRNA015).

[0659] RBD immunogen expression was measured at 24 hours using a SARS-CoV-2 RBD immunogen-specific ELISA. GLuc activity was measured at 24 hours using a Gaussia Luciferase activity assay (Thermo Scientific Pierce).

[0660] RBD immunogen expression was detected from circular RNAs encoding a SARS-CoV-2 RBD immunogen and GLuc protein (FIG. 6A). GLuc activity was detected from circular RNAs encoding GLuc polypeptide (FIG. 6B). This demonstrates that both SAR-CoV-2 RBD and GLuc immunogens were expressed in mammalian cells from a circular RNA encoding both SARS-CoV-2 RBD and GLuc immunogens.

### Experiment 2

[0661] In this Example, a circular RNA designed to include an IRES followed by an ORF encoding a SARS-CoV-2 RBD immunogen, a stop codon, a spacer, an IRES, an ORF encoding a Middle Eastern Respiratory Syndrome (MERS) RBD immunogen, and a stop codon. The circular RNA is produced and purified by the methods described herein.

[0662] The circular RNAs are transfected at various concentrations into HeLa cells (10,000 cells per well in a 96 well plate) using Lipofectamine MessengerMax (ThermoFisher, LMRNA015).

[0663] SARS-CoV-2 RBD immunogen expression is measured at 24 hours using a SARS-CoV-2 RBD immunogen-specific ELISA. MERS RBD immunogen expression is measured at 24 hours using a MERS RBD immunogen specific antibody capable of detection.

### Example 9: Immunogenicity of Multiple Immunogens from Circular RNAs in Mouse Model

[0664] This example describes expression of multiple immunogens in a subject by administrating multiple circular RNA molecules.

### Experiment 1

[0665] The immunogenicity of a circular RNA preparation comprising (a) a circular RNA encoding a SARS-CoV-2 RBD immunogen and (b) a circular RNA encoding GLuc polypeptide as a model immunogen, formulated in lipid nanoparticles, was evaluated in a mouse model. Production of antibodies to the SARS-CoV-2 RBD immunogen and GLuc activity were also evaluated in the mouse model.

[0666] A first circular RNA encoding a SARS-CoV-2 RBD immunogen (Nucleic acid SEQ ID NO: 56; Amino acid SEQ ID NO: 55) was designed and produced and purified by the methods described herein. A second circular RNA was designed with an IRES and ORF encoding GLuc polypeptide (Nucleic acid SEQ ID NO: 58; Amino acid SEQ ID NO. 57) and produced and purified by the methods described herein. The first circular RNA and the second circular RNA were mixed together to obtain a mixture. This mixture was then formulated with lipid nanoparticles to obtain a first circular RNA preparation. The first circular RNA and the second circular RNA were also separately formulated with lipid nanoparticles, and then mixed together to obtain a second circular RNA preparation.

[0667] Three mice were vaccinated intramuscularly with the first circular RNA preparation (for a total dose of 10 μg RBD+10 μg GLuc) at day 0 and with the second circular RNA preparation (for a total dose of 10 μg RBD+10 μg GLuc) at day 12. Additional mice (3 or 4 per group) were also vaccinated intramuscularly at day 0 and day 12 with: (i) a 10-μg dose of the first circular RNA formulated with lipid nanoparticles; (ii) a 10-μg dose of the second circular RNA formulated with lipid nanoparticles; or (iii) PBS.

[0668] Blood collection from each mouse was by submandibular drawing. Blood was collected into dry-anticoagulant free-tubes, at 2- and 17-days post-priming with the first circular RNA preparation. Serum was separated from whole blood by centrifugation at 1200 g for 30 minutes at 4° C. Individual serum samples were assayed for the presence of RBD-specific IgG by enzyme-linked immunosorbent assay (ELISA). ELISA plates (MaxiSorp 442404 96-well, Nunc) were coated overnight at 4° C. with SARS-CoV-2 RBD (Sino Biological, 40592-V08B; 100 ng) in 100 μL of 1× coating buffer (Biolegend, 421701). The plates were then blocked for 1 hour with blocking buffer (TBS with 2% BSA and 0.05% Tween 20). Serum dilutions (1:500, 1:1500, 1:4500, and 1:13,500) were then added to each well in 100 μL blocking buffer and incubated at room temperature for 1 hour. After washing three times with 1× Tris-buffered saline with Tween® detergent (TBS-T), plates were incubated with anti-mouse IgG HRP detection antibody (Abcam, ab97023) for 1 hour followed by three washes with TBS-T, then addition of tetramethylbenzene (Biolegend, 421101). The ELISA plate was allowed to react for 10-20 minutes and then quenched using 0.2N sulfuric acid. The optical density (O.D.) value was determined at 450 nm.

[0669] The optical density of each serum sample was divided by that of the background (plates coated with RBD, incubated only with secondary antibody). The fold over background of each sample was plotted.

[0670] The activity of GLuc was tested using a Gaussia Luciferase activity assay (Thermo Scientific Pierce). 50 μL of 1× GLuc substrate was added to 10 μL of serum to carry out the GLuc luciferase activity assay. Plates were read immediately after mixing in a luminometer instrument (Promega).

[0671] The results showed that anti-RBD antibodies were obtained at 17 days post prime (i.e., 17 days after injection with the first circular RNA preparation) (FIG. 7A) and GLuc activity was detected at 2 days post prime (i.e., 2 days after injection with the first circular RNA preparation) (FIG. 7B).

[0672] These results showed that circular RNA preparations comprising two circular RNAs encoding different immunogens induced immunogen-specific responses in mice.

### Experiment 2

[0673] The immunogenicity of a circular RNA preparation comprising (a) a circular RNA encoding a SARS-CoV-2 RBD immunogen and (b) a circular RNA encoding an Influenza hemagglutinin (HA) immunogen, formulated in lipid nanoparticles, was evaluated in a mouse model. Production of antibodies to the SARS-CoV-2 RBD and Influenza HA immunogens were also evaluated in the mouse model.

[0674] A first circular RNA encoding a SARS-CoV-2 RBD immunogen (Nucleic acid SEQ ID NO: 56; Amino acid SEQ ID NO: 55) was designed and produced and purified by the methods described herein.

[0675] A second circular RNA was designed to include an IRES followed by an ORF encoding hemagglutinin (HA) from Influenza A H1N1, A/California/07/2009 (Nucleic acid SEQ ID NO: 60; Amino acid SEQ ID NO: 59) and produced and purified by the methods described herein. The first circular RNA and the second circular RNA were mixed together to obtain a mixture. This mixture was then formulated with lipid nanoparticles as described to obtain a first circular RNA preparation. The first circular RNA and the second circular RNA were also separately formulated with lipid nanoparticles, and then mixed together to obtain a second circular RNA preparation.

[0676] Three mice were vaccinated intramuscularly with the first circular RNA preparation (for a total dose of 10 μg RBD+10 μg HA) at day 0 with the second circular RNA preparation (for a total dose of 10 μg RBD+10 μg HA) and at day 12. Additional mice (3 or 4 per group) were also vaccinated intramuscularly at day 0 and day 12 with: (i) a 10-μg dose of the first circular RNA formulated with lipid nanoparticles; (ii) a 10-μg dose of the second circular RNA formulated with lipid nanoparticles; or (iii) PBS.

[0677] Blood collection was as described in Experiment 1. The presence of RBD-specific IgG by ELISA was determined as described in Experiment 1.

[0678] Individual serum samples were assayed for the presence of HA-specific IgG by ELISA. ELISA plates were coated overnight at 4° C. with HA recombinant protein (Sino Biological, 11085-V08B; 100 ng) and plates were processed as described in Experiment 1. The optical density of each serum sample was divided by that of the background (plates coated with HA, incubated only with secondary antibody). The fold over background of each sample was plotted.

[0679] The results showed that anti-RBD and anti-HA antibodies were obtained at 17 days post prime (i.e., 17 days after injection with the first circular RNA preparation (FIGS. 9A and 9B).

[0680] The results also showed that circular RNA preparations comprising two circular RNAs encoding different immunogens induce an immunogen-specific immune response in mice.

### Experiment 3

[0681] The immunogenicity of a circular RNA preparation comprising (a) a circular RNA encoding a SARS-CoV-2 Spike immunogen and (b) a circular RNA encoding an Influenza hemagglutinin (HA) immunogen, formulated in lipid nanoparticles, was evaluated in a mouse model. Production of antibodies to the SARS-CoV-2 Spike and Influenza HA immunogens were also evaluated in the mouse model.

[0682] A first circular RNA encoding a SARS-CoV-2 Spike immunogen (Nucleic acid SEQ ID NO: 54; Amino acid SEQ ID NO: 53) was designed and produced and purified by the methods described herein. A second circular RNA was designed to include an IRES followed by an ORF encoding hemagglutinin (HA) from Influenza A H1N1, A/California/07/2009 (Nucleic acid SEQ ID NO: 60; Amino acid SEQ ID NO: 59) and produced and purified by the methods described herein. The first circular RNA and the second circular RNA were mixed together to obtain a mixture. This mixture was then formulated with lipid nanoparticles to obtain a first circular RNA preparation. The first circular RNA and the second circular RNA were also separately formulated with lipid nanoparticles, and then mixed together to obtain a second circular RNA preparation.

[0683] Three mice were vaccinated intramuscularly with the first circular RNA preparation at day 0 (for a total dose of 10 μg Spike+10 μg HA) and with the second circular RNA preparation (for a total dose of 10 μg Spike+10 μg HA) at day 12. Additional mice (3 or 4 per group) were also vaccinated intramuscularly at day 0 and day 12 with: (i) a 10-μg dose of the first circular RNA formulated with lipid nanoparticles; (ii) a 10-μg dose of the second circular RNA formulated with lipid nanoparticles; or (iii) PBS.

[0684] Blood collection was as described in Experiment 1 Serum was separated from whole blood by centrifugation at 1200 g for 30 minutes at 40C. Individual serum samples were assayed for the presence of RBD (i.e., RBD of Spike)-specific IgG by ELISA as described in Experiment 1.

[0685] Individual serum samples were assayed for the presence of HA-specific IgG by ELISA. ELISA plates were coated overnight at 4° C. with HA recombinant protein (Sino Biological, 11085-V08B; 100 ng) and plates were processed as described in Experiment 1. The optical density of each serum sample was divided by that of the background (plates coated with HA, incubated only with secondary antibody). The fold over background of each sample was plotted.

[0686] The results showed that anti-RBD antibodies and anti-HA antibodies were obtained at 17 days post prime (i.e., 17 days after injection with the first circular RNA preparation (FIGS. 8A and 8B).

[0687] The results also showed that circular RNA preparations comprising two circular RNAs encoding different immunogens induced immunogen-specific immune responses in mice.

### Example 10: Immunogenicity of a Circular RNA Comprising Multiple Immunogens in a Mouse Model

[0688] This Example describes the immunogenicity of a circular RNA comprising multiples immunogens.

[0689] This example also describes production of antibodies in a mouse model to multiple immunogens encoded by a single circular RNA.

### Experiment 1

[0690] In this Example, a circular RNA is designed to include an IRES followed by an ORF encoding GLuc, a stop codon, a spacer, an IRES, an ORF encoding SARS-CoV-2 RBD immunogen, and a stop codon, produced and purified as described in Example 8. As controls, the following circular RNAs are produced as described above: (i) a circular RNA with an IRES and ORF encoding a SARS-CoV-2 RBD immunogen; (ii) a circular RNA with an IRES and ORF encoding GLuc.

[0691] The circular RNAs are formulated with lipid nanoparticles to obtain a circular RNA preparation.

[0692] Three mice per group are vaccinated intramuscularly with a 10 μg or 20 μg total dose of circular RNA preparation at day 0 and at day 12.

[0693] Blood collection is as described in Example 9. The presence of RBD-specific IgG by ELISA is determined as described in Example 9. GLuc activity is measured as described in Example 9.

### Experiment 2

[0694] The immunogenicity of a circular RNA preparation comprising a circular RNA designed to include an IRES followed by an ORF encoding a SARS-CoV-2 RBD immunogen, a stop codon, a spacer, an IRES, an ORF encoding a MERS RBD immunogen, and a stop codon, formulated in lipid nanoparticles, is evaluated in a mouse model. Production of antibodies to the SARS-CoV-2 RBD and MERS RBD immunogens are also evaluated in the mouse model.

[0695] This circular RNA is then formulated with lipid nanoparticles as described in Example 7 to obtain a circular RNA preparation.

[0696] Mice are vaccinated intramuscularly or intradermally with the circular RNA preparation with amounts of 5 μg, 10 μg, 20 μg, or 50 μg at day 0 and again at least one day after the initial administration.

[0697] Blood collection is as described in Experiment 1. The presence of SARS-CoV-2 RBD-specific IgG by ELISA is determined as described in Experiment 1. The presence of MERS RBD-specific IgG is also determined by ELISA.

[0698] Individual serum samples are assayed for the presence of anti-SARS-CoV-2 RBD binding antibodies, anti-MERS RBD binding antibodies, neutralizing antibodies against the SARS-CoV-2 RBD immunogen, neutralizing antibodies against the MERS RBD immunogen, a cellular response to the SARS-CoV-2 immunogen, and a cellular response to the MERS RBD immunogen.

### Example 11: Evaluation of T Cell Responses

[0699] An ELISpot assay is used to detect the presence of SARS-CoV-2 Spike or RBD-specific T cells or Influenza HA-specific T cells. This assay is performed on the following groups of mice from Example 9:
[0700] 1. RBD
[0701] 2. GLuc
[0702] 3. HA
[0703] 4. Spike
[0704] 5. RBD+HA
[0705] 6. Spike+HA
[0706] 7. PBS

[0707] Mice spleens are harvested on day 30 post boost (i.e., 30 days after injection with the first circular RNA preparation) and processed into a single cell suspension. Splenocytes are plated at 0.5M cells per well on IFN-g or IL-4 ELISpot plates (ImmunoSpot). Splenocytes are either left unstimulated or stimulated with SARS CoV-2 and HA peptide pools (JPT, PM-WCPV-SRB and PM-IFNA_HACal). ELISPOT plates are processed according to manufacturer's protocol.

### Example 12: Evaluation of Antibody Response in Mice Administered Circular RNA Encoding Multiple Immunogens

[0708] This example demonstrates an antibody response resulting from administration of a circular RNA encoding the expression of the multiple immunogens.

[0709] A hemagglutination inhibition assay (HAI) was used to measure anti-Influenza HA antibodies that prevent hemagglutination in serum from mice. Mice were administered a preparation of circular RNA each of which was designed and produced the methods described herein, and which encode for the expression of: a SARS-CoV-2 RBD immunogen, a SARS-CoV-2 Spike immunogen, an Influenza HA immunogen, a SARS-CoV-2 RBD immunogen and an Influenza HA immunogen, a SARS-CoV-2 RBD immunogen and a GLuc protein, or a SARS-CoV-2 RBD immunogen and a SARS-CoV-2 Spike immunogen. Blood collection was as described in Example 9, Experiment 1 and was performed on day 2 and day 17 after injection.

[0710] Two-fold serial dilutions of the collected sample from mice on day 2 and day 17 were prepared. A fixed amount of influenza virus with known hemagglutinin (HA) titer was added to every well of a 96-well plate, to a concentration equivalent to 4 hemagglutinin units, with the exception of the serum control wells, where no virus was added. The plate was allowed to stand at room temperature for 60 minutes, after which the red blood cell samples were added and allowed to incubate at 4° C. for 30 minutes. The highest serum dilution that prevented hemagglutination was determined to be the HAI titer of the serum. The sample collected on day 17 showed HAI titer in samples that were administered circular RNA preparations encoding the Influenza HA immunogen when it was administered alone or when administered in combination with SARS-CoV-2 immunogens e.g., RBD or Spike (FIG. 10). HAI titers on day 17 were not seen from samples where HA immunogen had not been administered e.g., the SARS-CoV-2 RBD immunogen alone or SARS-CoV-2 Spike immunogen alone.

### Example 13: Expression of an Adjuvant from Circular RNA in Mammalian Cells

[0711] This example demonstrates expression of a polypeptide adjuvant from circular RNA in mammalian cells.

[0712] In this example, a circular RNA was designed to include an IRES, an ORF encoding the adjuvant IL-12 (Nucleic acid SEQ ID NO: 217; Amino acid SEQ ID NO: 218), and two spacer elements flanking the IRES-ORF. As a control, a circular RNA including an IRES, an ORF encoding a SARS-CoV-2 RBD immunogen, and two spacer elements flanking the IRES-ORF was used. The circular RNAs were produced and purified according to the methods described herein.

[0713] Purified circular RNAs (0.1 and 1 picomoles) were transfected into HeLa cells (10,000 cells per well) using Lipofectamine MessengerMax (Invitrogen LMRNA001) according to the manufacturer's instructions.

[0714] IL-12 expression was measured using an IL-12 specific ELISA (ThermoFisher, BMS6004) in cell culture supernatant. Data are shown as Mean and SEM values of two replicates.

[0715] The results showed that IL-12 encoded by circular RNA was expressed by HeLa cells and not in the control (FIG. 11). This example shows that the IL-12 adjuvant was expressed from circular RNA in mammalian cells.

### Example 14: In Vivo Expression of an Adjuvant from Circular RNA in Mouse Model

[0716] This example demonstrates in vivo expression of a polypeptide adjuvant from a circular RNA.

[0717] In this example, the following circular RNAs were produced and purified according to the methods described herein: (i) a first circular RNA with an IRES and an ORF encoding an IL-12 adjuvant (Nucleic acid SEQ ID NO: 217 Amino acid SEQ ID NO: 218); and (ii) a second circular RNA with an IRES and ORF encoding a SARS-CoV-2 RBD immunogen with an N-terminal Gluc signal sequence (Nucleic acid SEQ ID NO: 56; Amino acid SEQ ID NO: 55). The first circular RNA and the second circular RNA were each separately formulated with lipid nanoparticles and then mixed together to obtain a first circular RNA preparation.

[0718] To formulate the circular RNA or mRNA with a lipid nanoparticle, circular RNA or mRNA was diluted in 25 mM acetate buffer pH=4 (filtered through 0.2 μm filter) to a concentration of 0.2 μg/μL. Lipid nanoparticles (LNPs) were formulated by first dissolving the ionizable lipid (e.g., ALC0315), cholesterol, DSPC, and DMG-PEG2000 in ethanol (filtered through 0.2 μm sterile filter) in a molar ratio of 50/38.5/10/1.5 mol %. The final ionizable lipid/RNA weight ratio was 8/1 w/w. The lipid and RNA solutions were mixed in a micromixer chip using microfluidics system with a flow rate ratio of 3/1 buffer/ethanol and a total flow rate of 1 ml/min. The LNPs were then dialyzed in PBS pH=7.4 for 3 h to remove ethanol. The RNA concentration inside the LNPs and the encapsulation efficiency were measured using Ribogreen® assay. If necessary, the LNPs were concentrated down to the desired RNA concentration using Amicon centrifugation filters, 100 kDa cut off. The size, concentration, and charge of the particles were measured using Zetasizer Ultra (Malvern Pananaytical). The RNA concentration was adjusted with PBS to a final concentration of 0.1 or 0.2 μg/μl. For formulations containing two RNA sequences the RNAs were either mixed before formulating in LNPs or after each RNA was formulated separately. For in vivo experiments, the final RNA formulated in LNPs were filtered through sterile 0.2 μm regenerated cellulose filters.

[0719] Three mice were vaccinated intramuscularly at day 0 with the first circular RNA preparation (10 μg dose). As controls, three mice per group were vaccinated intramuscularly with: (i) the second circular RNA formulated with lipid nanoparticles (10 μg dose) (i.e., the second circular RNA preparation); or (ii) PBS. Blood collection from each mouse was by submandibular drawing. Blood was collected from each mouse into dry-anticoagulant free-tubes at 2 days after administration of circular RNA or PBS. Serum was separated from whole blood by centrifugation at 1200 g for 30 minutes at 4° C. Individual serum samples were assayed for the presence of IL12 using a cytokine bead array (Biolegend, 749622). Data are shown as Mean and SEM values of three replicates.

[0720] The results showed that IL-12 expression was detected in serum at 2 days after injection with the first circular RNA preparation but was not detected after injection with either of the controls (FIG. 12A).

[0721] To determine if the expressed IL12 is functional, IFN-γ (directly downstream of IL12 signaling) production in the serum was measured 2 days after injection with the circular RNA preparations. IFN-γ production was detected in serum in the same cytokine bead array assay described herein (Biolegend, 749622). Data are shown as Mean and SEM values of 3 replicates.

[0722] The results showed an increase in serum IFN-γ, indicating that circular RNA expressed IL12 is functional (FIG. 12B).

### Example 15: Induction of Immunogenicity in a Mouse Model by Co-Administration of an Immunogen and an Adjuvant Encoded by a Plurality of Circular RNAs

[0723] This example demonstrates the immunogenicity induced by administration of a plurality of circular RNAs to a subject. One circular RNA administered encodes an immunogen. Another circular RNA administered encodes a polypeptide adjuvant.

[0724] In this example, the following circular RNAs were produced and purified according to the methods described herein: (i) a first circular RNA with an IRES and an ORF encoding an IL-12 adjuvant (Nucleic acid SEQ ID NO: 217; Amino acid SEQ ID NO: 218); and (ii) a second circular RNA with an IRES and ORF encoding a SARS-CoV-2 RBD immunogen with an N-terminal Gluc signal sequence (Nucleic acid SEQ ID NO: 56; Amino acid SEQ ID NO: 55). The first circular RNA and the second circular RNA were each separately formulated with lipid nanoparticles and then mixed together to obtain a first circular RNA preparation.

[0725] To formulate the circular RNA or mRNA with a lipid nanoparticle, circular RNA or mRNA was diluted in 25 mM acetate buffer pH=4 (filtered through 0.2 μm filter) to a concentration of 0.2 μg/μL. Lipid nanoparticles (LNPs) were formulated by first dissolving the ionizable lipid (e.g., ALC0315), cholesterol, DSPC, and DMG-PEG2000 in ethanol (filtered through 0.2 μm sterile filter) in a molar ratio of 50/38.5/10/1.5 mol %. The final ionizable lipid/RNA weight ratio was 8/1 w/w. The lipid and RNA solutions were mixed in a micromixer chip using microfluidics system with a flow rate ratio of 3/1 buffer/ethanol and a total flow rate of 1 ml/min. The LNPs were then dialyzed in PBS pH=7.4 for 3 h to remove ethanol. The RNA concentration inside the LNPs and the encapsulation efficiency were measured using Ribogreen® assay. If necessary, the LNPs were concentrated down to the desired RNA concentration using Amicon centrifugation filters, 100 kDa cut off. The size, concentration, and charge of the particles were measured using Zetasizer Ultra (Malvern Pananaytical). The RNA concentration was adjusted with PBS to a final concentration of 0.1 or 0.2 μg/μL. For formulations containing two RNA sequences the RNAs were either mixed before formulating in LNPs or after each RNA was formulated separately. For in vivo experiments, the final RNA formulated in LNPs were filtered through sterile 0.2 μm regenerated cellulose filters.

[0726] Three mice were vaccinated intramuscularly at day 0 and day 14 with the first circular RNA preparation (2.5 μg dose per circular RNA per injection). As controls, three mice per group were vaccinated intramuscularly with: (i) the second circular RNA formulated with lipid nanoparticles (2.5 μg dose per injection) (i.e., the second circular RNA preparation); or (ii) PBS. Mice were euthanized 22 days post the first dose and splenocytes processed into a single cell suspension. Splenocytes were either left unstimulated or stimulated with RBD peptide pool (JPT, PM-WCPV-S-RBD-2) for 1 hour. Protein transport inhibitors (Monensin, BD 554724) and Brefeldin A, BD 555029)) were then added to the media followed by 5 more hours of culture. The cells were stained using the BD fixation and permeabilization kit (BD, 554714) according to the manufacturer's protocol. Antibodies used: viability dye (ThermoFisher, L₁₀₁₁), CD8 (ThermoFisher, MA5-16759) and CD44 (Biolegend, 103026). Stained cells were analyzed by flow cytometry.

[0727] The data shows that the first circular RNA preparation increased the number of RBD specific CD4 T cells relative to the control, i.e., the second circular RNA preparation (FIG. 13A) and that no changes in RBD specific CD8 T cells were observed (FIG. 13B). In addition, the first circular RNA preparation increased the amount of IFN-γ production by both CD4 and CD8 T cells (FIGS. 13C, 13D). This shows that circular RNA expressing IL12 is acting as an adjuvant boosting cellular immune response elicited by circular RNA expressing an immunogen. Data shown as mean and SEM of 3 replicates. FIG. 13A: Asterisks denotes statistical significance as determined by a two-way RM ANOVA protected Tukey's post hoc test. FIGS. 13C, 13D: Asterisks denotes statistical significance as determined by unpaired t-test.

[0728] While preferred embodiments of the present invention have been shown and described herein, it will be obvious to those skilled in the art that such embodiments are provided by way of example only. Numerous variations, changes, and substitutions will now occur to those skilled in the art without departing from the invention. It should be understood that various alternatives to the embodiments of the invention described herein may be employed in practicing the invention. It is intended that the following claims define the scope of the invention and that methods and structures within the scope of these claims and their equivalents be covered thereby.

### Example 16: In Vivo Expression of Non-Secreted SARS-CoV-2 Immunogen from RNA in Non-Human Primate Model

[0729] This example demonstrates in vivo expression a non-secreted of SAR-CoV-2 immunogen from circular RNA in a non-human primate (NHP).

[0730] Circular RNA was designed to include an internal ribosome entry site (IRES) and a nucleotide sequence encoding a SAR-CoV-2 spike immunogen. The DNA construct was designed to include an IRES, a polynucleotide cargo, and a spacer element. In this example, the construct was designed to include a CVB3 IRES (SEQ ID NO: 45) and a nucleotide sequence encoding a SARS-CoV-2 spike ORF (SEQ ID NO: 237) as the polynucleotide cargo.

[0731] In this example, the circular RNA was generated by self-splicing using a method described herein. Unmodified linear RNA was synthesized by in vitro transcription using T7 RNA polymerase from a DNA template including the motifs listed above in the presence of 7.5 mM of NTP. Synthesized linear RNA was purified with an RNA clean up kit (New England Biolabs, T2050). Self-splicing occurred during transcription; no additional reaction was required. The circular RNA was purified by urea polyacrylamide gel electrophoresis (Urea-PAGE) or by reversed phase column chromatography.

[0732] Purified circular RNA was formulated into a lipid nanoparticle (LNP) to obtain a circular RNA preparation. Briefly, circular RNA was diluted in 25 mM acetate buffer pH=4 (filtered through 0.2 um filter) to a concentration of 0.2 μg/μL. LNPs were formulated by first dissolving the ionizable lipid (e.g., ALC0315), cholesterol, DSPC, and DMG-PEG2000 in ethanol (filtered through 0.2 um sterile filter) in a molar ratio of 50/38.5/10/1.5 mol %. The final ionizable lipid/RNA weight ratio was 6/1 w/w. The lipid and RNA solutions were mixed in a micromixer chip using microfluidics system with a flow rate ratio of 3/1 buffer/ethanol and a total flow rate of 1 ml/min. The LNPs were then dialyzed in PBS pH=7.4 for 3 hours to remove ethanol. The LNPs were concentrated to the desired RNA concentration using Amicon centrifugation filters, 100 kDa cut off, as necessary.

[0733] Three cynomolgus monkeys (n=3) per group were administered either a 30 μg or 100 μg dose of LNP-formulated circular RNA via intramuscular injection at day 0 (prime) and day 28 (boost). At 6 hours post-prime, serum samples were collected from each monkey. Spike levels were measured using a SARS-CoV-2 Spike immunoassay according to manufacturer's protocol (MDS, S-PLEX SARS-CoV-2 Spike Kit, K150ADJS-2).

[0734] Spike immunogen was detected in serum of monkeys that received 100 μg of LNP-formulated circular RNA at 6 hours post prime (FIG. 14, data shown as the mean of three animals per group).

### Example 17: In Vivo Expression of Secreted Immunogen from Circular RNA in Non-Human Primate Model

[0735] This example demonstrates in vivo expression of a secreted SAR-CoV-2 immunogen from circular RNA in a non-human primate (NHP).

[0736] Circular RNA was designed to include an IRES and a nucleotide sequence encoding a SARS-CoV-2 RBD immunogen. The DNA construct was designed to include an IRES, a polynucleotide cargo, and a spacer element. In this example, the construct was designed to include an EMCV IRES (SEQ ID NO: 31) and a nucleotide sequence encoding a Gaussia luciferase (Glue) secretion signal sequence and a SARS-CoV-2 RBD immunogen fused to a T4 Foldon domain (SEQ ID NO: 303) as the polynucleotide payload. The circular RNA was produced as described in Example 16.

[0737] Circular RNA was formulated in LNP as described in Example 16 (LNP-formulated circular RNA). Circular RNA was also formulated by admixing with an equal volume of AddaSO3™ adjuvant solution (adjuvanted circular RNA).

[0738] Three cynomolgus monkeys (n=3) per group were administered either a 30 μg or 100 μg dose of LNP-formulated circular RNA, or a 1000 μg dose of adjuvanted circular RNA via intramuscular injection at day 0 (prime) and day 28 (boost). At 6 hours, Day 1, Day 4, Day 6 post-prime, serum samples were collected from each monkey. SARS-CoV-2 RBD immunogen fused to a T4 foldon multimerization domain levels were measured using a SARS-CoV-2 Spike immunoassay according to manufacturer's protocol (MDS, S-PLEX SARS-CoV-2 Spike Kit, K150ADJS-2).

[0739] SARS-CoV-2 RBD immunogen fused to a T4 foldon multimerization domain expression was not detected in serum of monkeys that were administered adjuvanted circular RNAs. SARS-CoV-2 RBD immunogen fused to a T4 foldon multimerization domain was detected in serum of monkeys that received 100 μg of LNP-formulated circular RNA (FIG. 15, data shown as the mean of three animals per group). SARS-CoV-2 RBD immunogen fused to a T4 foldon multimerization domain levels of ˜3500 fg/mL were detected at 6 hours post-prime, with a SARS-CoV-2 RBD immunogen fused to a T4 foldon multimerization domain concentrations decreasing over the course of the 6 days during which samples were collected.

### Example 18: Immunogenicity of Immunogens from Circular RNA in Non-Human Primate Model

[0740] This example demonstrates circular RNA encoding a SARS-CoV-2 immunogen induces an immunogen-specific response in a non-human primate (NHP).

[0741] Serum samples were isolated from monkeys administered 30 μg or 100 μg dose of LNP-formulated circular RNA, or 1000 μg dose of adjuvanted circular RNA as described in Examples 16 and 17, at Days 14 and 42 post-prime.

[0742] Binding antibody was detected using a SARS-CoV-2 Spike immunoassay according to manufacturer's protocol MDS. S-PLEX SARS-CoV-2 Spike Kit, K150ADJS-2). NHP serum was diluted at 1:1000 or 1:5000 or 1:50 000. Binding antibody concentration was interpolated using the pooled serum standard and results were reported as Geometric Mean international Units per mL.

[0743] FIG. 16A shows the geometric mean IU/mL of Spike specific antibody at pre-bleed, Day 14 and Day 42 post-immunization with LNP-formulated circular RNAs (Spike (30 μg and 100 μg), SARS-CoV-2 RBD immunogen fused to a T4 foldon multimerization domain (100 μg)), and adjuvanted circular RNA (SARS-CoV-2 RBD immunogen fused to a T4 foldon multimerization domain (1000 μg)). The results show that LNP-formulated circular RNA encoding a SARS-CoV-2 Spike immunogen primed Spike-specific binding antibodies at Day 42 post-prime at 100 μg and 30 μg dose levels. The results also show that LNP-formulated circular RNA encoding a SARS-CoV-SARS-CoV-2 RBD immunogen fused to a T4 foldon multimerization domain primed Spike-specific binding antibodies at Day 42 post-prime, and that adjuvanted circular RNA encoding a SARS-CoV-2 RBD immunogen fused to a T4 foldon multimerization domain primed similar levels of Spike-specific binding antibodies.

[0744] FIG. 16B shows the geometric mean IU/mL of RBD specific antibody at pre-bleed, Day 14 and Day 42 post-immunization with LNP-formulated circular RNAs (Spike (30 μg and 100 μg), SARS-CoV-2 RBD immunogen fused to a T4 foldon multimerization domain (100 μg)), and adjuvanted circular RNA (SARS-CoV-2 RBD immunogen fused to a T4 foldon multimerization domain (1000 μg)). The results show that LNP-formulated circular RNA encoding a SARS-CoV-2 Spike immunogen primed RBD-specific binding antibodies at Day 42 post-prime at 100 μg and 30 μg dose levels. The results also show that LNP-formulated circular RNA primed RBD-specific binding antibodies at Day 42 post-prime, and that adjuvanted circular RNA encoding a SARS-CoV-2 RBD immunogen fused to a T4 foldon multimerization domain primed similar levels of RBD-specific binding antibodies.

[0745] The neutralizing antibody titer from serum collected on pre-bleed, Day 14 and Day 42 post-prime was tested in a Plaque Reduction Neutralization Test (PRNT). Briefly serum was serially diluted, mixed with SARS-CoV-2 viral stock and placed on Vero E6 cells. Plates were overlayed with low-melting point agarose and incubated for 3 days, followed by fixation and staining with crystal violet. The neutralization titer was reported as D50: the dilution at which the serum reduces the number of plaques by fifty percent (50%). Data are shown in FIGS. 17A and 17B as geometric mean neutralizing titer at pre-bleed, and Day 14 and Day 42 post-boost.

[0746] FIG. 17A shows that DLNP-formulated circular RNA encoding Spike (30 μg and 100 μg) primed SARS-CoV-2 neutralizing antibodies at Day 42.

[0747] FIG. 17B shows that both LNP-formulated circular RNA encoding a SARS-CoV-2 RBD immunogen fused to a T4 foldon multimerization domain and adjuvanted circular RNA encoding a SARS-CoV-2 RBD immunogen fused to a T4 foldon multimerization domain primed SARS-CoV-2 neutralizing antibody.

### Example 19: T Cell Responses of Immunogens from Circular RNA in Non-Human Primate Model

[0748] Peripheral blood mononuclear cells (PBMCs) are harvested and frozen pre-immunization and at D42 post-immunization. PBMCs are thawed and an ELISpot assay is used to detect the presence of SARS-CoV-2 RBD-specific T cells. 0.2 M cells are plated per well on IFN-γ or IL-4 ELISpot plates (ImmunoSpot) and are either left unstimulated or stimulated with SARS-CoV-2 peptide pools (JPT, PM-WCPVS-2). ELISpot plates are processed according to manufacturer's protocol.

### Numbered Embodiments

[1] A circular polyribonucleotide comprising an open reading frame encoding a coronavirus immunogen, wherein the coronavirus immunogen comprises an amino acid sequence having at least 95% sequence identity with the amino acid sequence of any one of SEQ ID NOs: 63-111 and 283-291.
[2] The circular polyribonucleotide of embodiment [1], wherein the coronavirus immunogen is a RBD immunogen having at least 95% identity with the amino acid sequence of any one of SEQ ID NOs: 63-68, 74, 79, 81-86, and 98-111.
[3] The circular polyribonucleotide of [1], wherein the coronavirus immunogen is a Spike immunogen having at least 95% identity with the amino acid sequence of any one of SEQ ID NOs: 69-73, 75-78, 80, 87-97 and 283-286.
[4] The circular polyribonucleotide of embodiment [1 [. wherein the coronavirus immunogen is a nonstructural protein (nsp) immunogen having at least 95% identity with the amino acid sequence of any one of SEQ ID NOs: 291-295.
[5] The circular polyribonucleotide of embodiment [1], wherein the coronavirus immunogen comprises an amino acid sequence of any one of SEQ ID NOs: 63-111 and 283-291.
[6] The circular polyribonucleotide of any one of embodiments [1]-[5], wherein the open reading frame comprises a nucleic acid sequence having at least 95% sequence identity with the nucleic acid sequence of any one of SEQ ID NOs: 112-174 and 292-300.
[7] The circular polyribonucleotide of embodiment [6], wherein the coronavirus immunogen is a RBD immunogen having at least 95% identity with the nucleic acid sequence of any one of SEQ ID NOs: 112-117, 123, 128, 133-138, and 163-174.
[8] The circular polyribonucleotide of embodiment [6], wherein the coronavirus immunogen is a Spike immunogen having at least 95% identity with the nucleic sequence of any one of SEQ ID NOs: 118-122, 124-127, 129-132, 139-162, and 287-291.
[9] The circular polyribonucleotide of embodiment [6], wherein the coronavirus immunogen is a nsp having at least 95% identity with the nucleic sequence of any one of SEQ ID NOs: 296-300.
[10] The circular polyribonucleotide of embodiment [6], wherein the open reading frame comprises a nucleic acid sequence of any one of SEQ ID NOs: 112-174 and 292-300.
[11] The circular polyribonucleotide of any one of embodiment [1]-[10], wherein the open reading frame encoding the coronavirus immunogen is operably linked to an IRES.
[12] The circular polyribonucleotide of any one of embodiment [1]-[11], wherein the open reading frame encoding the coronavirus immunogen encodes a second polypeptide.
[13] The circular polyribonucleotide of embodiment [12], wherein the coronavirus immunogen and the second polypeptide are separated by a polypeptide linker, a 2A self-cleaving peptide, a protease cleavage site, or 2A self-cleaving peptide in tandem with a protease cleavage site.
[14] The circular polyribonucleotide of embodiment [13], wherein the protease cleavage site is a furin cleavage site.
[15] The circular polyribonucleotide of any one of embodiments [1]-[11], wherein the circular polyribonucleotide further comprises a second open reading frame encoding a second polypeptide operably linked to a second IRES.
[16] The circular polyribonucleotide of any one of embodiments [12]-[15], wherein the second polypeptide is a polypeptide immunogen.
[17] The circular polyribonucleotide of embodiment [16], wherein the second polypeptide is a viral immunogen.
[18] The circular polyribonucleotide of embodiment [17], wherein the second polypeptide is a coronavirus immunogen.
[19] The circular polyribonucleotide of embodiment [18], wherein the second coronavirus immunogen comprises an amino acid sequence of any one of SEQ ID NOs: 1-10, 53, 55, 57, 63-111, and 283-291.
[20] The circular polyribonucleotide of embodiment [17], wherein the second polypeptide is an influenza immunogen.
[21] The circular polyribonucleotide of any one of embodiments [12]-[15], wherein the second polypeptide is a polypeptide adjuvant.
[22] The circular polyribonucleotide of embodiment [18], wherein the adjuvant is a cytokine, a chemokine, a costimulatory molecule, an innate immune stimulator, a signaling molecule, a transcriptional activator, a cytokine receptor, a bacterial component, or a component of the innate immune system.
[23] The circular polyribonucleotide of any one of embodiments [1]-[22], wherein the circular polyribonucleotide further comprises a non-coding ribonucleic acid sequence that is an innate immune system stimulator.
[24] The circular polyribonucleotide of embodiment [23], wherein the innate immune system stimulator is selected from a GU-rich motif, an AU-rich motif, a structured region comprising dsRNA, or an aptamer.
[25] A circular polyribonucleotide comprising a first sequence encoding a coronavirus immunogen and a second sequence encoding a polypeptide adjuvant.
[26] The circular polyribonucleotide of embodiment [25], wherein the sequence encoding the coronavirus immunogen is operably linked to a first IRES and the sequence encoding the polypeptide adjuvant is operably linked to a second IRES.
[27] The circular polyribonucleotide of embodiment [25], wherein the coronavirus immunogen and the polypeptide adjuvant are encoded by a single open-reading frame operably linked to an IRES.
[28] The circular polyribonucleotide of embodiment [27], wherein coronavirus immunogen and the polypeptide adjuvant are separated by a polypeptide linker, a 2A self-cleaving peptide, a protease cleavage site, or 2A self-cleaving peptide in tandem with a protease cleavage site.
[29] The circular polyribonucleotide of any one of embodiments [25]-[28], wherein polypeptide adjuvant is a cytokine, a chemokine, a costimulatory molecule, an innate immune stimulator, a signaling molecule, a transcriptional activator, a cytokine receptor, a bacterial component, or a component of the innate immune system.
[30] The circular polyribonucleotide of any one of embodiments [25]-[29], wherein the second coronavirus immunogen comprises an amino acid sequence of any one of SEQ ID NOs: 1-10, 53, 55, 57, 63-111, and 283-291.
[31] A circular polyribonucleotide comprising an open reading frame encoding a coronavirus immunogen and a non-coding ribonucleic acid sequence that is an innate immune system stimulator.
[32] The circular polyribonucleotide of embodiment [31], wherein the innate immune system stimulator is selected from a GU-rich motif, an AU-rich motif, a structured region comprising dsRNA, or an aptamer.
[33] The circular polyribonucleotide of embodiment [31] or embodiment [32], wherein the second coronavirus immunogen comprises an amino acid sequence of any one of SEQ ID NOs: 1-10, 53, 55, 57, 63-111, and 283-291.
[34] A circular polyribonucleotide comprising a first sequence encoding a coronavirus immunogen and a second sequence encoding a multimerization domain.
[35] The circular polyribonucleotide of embodiment [34], wherein the multimerization domain comprises a T4 foldon domain.
[36] The circular polyribonucleotide of embodiment [34], wherein the multimerization domain comprises a ferritin domain.
[37] The circular polyribonucleotide of embodiment [34], wherein the multimerization domain comprises a β-annulus peptide.
[38] The circular polyribonucleotide of any one of embodiments [34]-[37], wherein the multimerization domain is at the N-terminus of the coronavirus immunogen.
[39] The circular polyribonucleotide of any one of embodiments [34]-[37], wherein the multimerization domain is at the C-terminus of the coronavirus immunogen.
[40] An immunogenic composition comprising the circular polyribonucleotide of any one of embodiments [1]-[39] and a pharmaceutically acceptable excipient and is free of any carrier.
[41] An immunogenic composition comprising the circular polyribonucleotide of any one of embodiments [1]-[39] and a pharmaceutically acceptable carrier or excipient.
[42] The immunogenic composition of embodiment [40] or embodiment [41], wherein the composition further comprises a second circular polyribonucleotide.
[43] The immunogenic composition of embodiment [42], wherein the second circular polyribonucleotide comprises and open reading frame encoding a second polypeptide immunogen.
[44] The immunogenic composition of embodiment [42], wherein the second circular polyribonucleotide comprises an open reading frame encoding a polypeptide adjuvant.
[45] The immunogenic composition of embodiment [42], wherein the second circular polyribonucleotide comprises a non-coding ribonucleic acid sequence that is an innate immune system stimulator.
[46]A linear polyribonucleotide comprising an open reading frame encoding a coronavirus immunogen, wherein the coronavirus immunogen comprises an amino acid sequence having at least 95% sequence identity with the amino acid sequence of any one of SEQ ID NOs: 63-111 and 283-291.
[47] The linear polyribonucleotide of embodiment [46], wherein the coronavirus immunogen comprises an amino acid sequence of any one of SEQ ID NOs: 63-111 and 283-291.
[48] The linear polyribonucleotide of embodiment [46] or embodiment [47], wherein the open reading frame comprises a nucleic acid sequence having at least 95% sequence identity with the nucleic acid sequence of any one of SEQ ID NOs: 112-174 and 292-300.
[49] The linear polyribonucleotide of embodiment [46], wherein the open reading frame comprises a nucleic acid sequence of any one of SEQ ID NOs: 112-174 and 292-300.
[50] The linear polyribonucleotide of any one of embodiments [46]-[49], wherein the open reading frame encoding the coronavirus immunogen is operably linked to an IRES.
[51] The linear polyribonucleotide of any one of embodiments [46]-[50], wherein the open reading frame encoding the coronavirus immunogen encodes a second polypeptide.
[52] The linear polyribonucleotide of embodiment [51], wherein the coronavirus immunogen and the second polypeptide are separated by a polypeptide linker, a 2A self-cleaving peptide, a protease cleavage site, or 2A self-cleaving peptide in tandem with a protease cleavage site.
[53] The linear polyribonucleotide of embodiment [52], wherein the protease cleavage site is a furin cleavage site.
[54] The linear polyribonucleotide of any one of embodiments [46]-[49], wherein the circular polyribonucleotide further comprises a second open reading frame encoding a second polypeptide operably linked to a second IRES.
[55] The linear polyribonucleotide of any one of embodiments [51]-[54], wherein the second polypeptide is a polypeptide immunogen.
[56] The linear polyribonucleotide of embodiment [55], wherein the second polypeptide is a coronavirus immunogen.
[57] The linear polyribonucleotide of any one of embodiments [51]-[54], wherein the second polypeptide is a polypeptide adjuvant.
[58] The linear polyribonucleotide of embodiment [57], wherein the adjuvant is a cytokine, a chemokine, a costimulatory molecule, an innate immune stimulator, a signaling molecule, a transcriptional activator, a cytokine receptor, a bacterial component, or a component of the innate immune system.
[59] The linear polyribonucleotide of any one of embodiments [46]-[58], wherein the linear polyribonucleotide further comprises a non-coding ribonucleic acid sequence that is an innate immune system stimulator.
[60] The linear polyribonucleotide of embodiment [59], wherein the innate immune system stimulator is selected from a GU-rich motif, an AU-rich motif, a structured region comprising dsRNA, or an aptamer.
[61]A linear polyribonucleotide comprising a first sequence encoding a coronavirus immunogen and a second sequence encoding a multimerization domain.
[62] The linear polyribonucleotide of embodiment [61], wherein the multimerization domain comprises a T4 foldon domain.
[63] The linear polyribonucleotide of embodiment [61], wherein the multimerization domain comprises a ferritin domain.
[64] The linear polyribonucleotide of embodiment [61], wherein the multimerization domain comprises a pi-annulus peptide.
[65] The linear polyribonucleotide of any one of embodiments [61]-[64], wherein the multimerization domain is at the N-terminus of the coronavirus immunogen.
[66] The linear polyribonucleotide of any one of embodiments [61]-[64], wherein the multimerization domain is at the C-terminus of the coronavirus immunogen.
[67] An immunogenic composition comprising the linear polyribonucleotide of any one of embodiments [46]-[66] and a pharmaceutically acceptable excipient and is free of any carrier.
[68] An immunogenic composition comprising the linear polyribonucleotide of any one of embodiments [46]-[66] and a pharmaceutically acceptable carrier or excipient.
[69] The immunogenic composition of embodiment [67] or embodiment [68], wherein the composition further comprises a second linear polyribonucleotide.
[70] The immunogenic composition of embodiment [69], wherein the second linear polyribonucleotide comprises an open reading frame encoding a second polypeptide immunogen.
[71] The immunogenic composition of embodiment [69], wherein the second linear polyribonucleotide comprises an open reading frame encoding a polypeptide adjuvant.
[72] The immunogenic composition of embodiment [69], wherein the second linear polyribonucleotide comprises a non-coding ribonucleic acid sequence that is an innate immune system stimulator.
[73]A method of inducing an immune response against a coronavirus immunogen in a non-human animal or human subject comprising a) administering the immunogenic composition of any one of embodiments [40]-[45] and [67]-[72] to the non-human animal or human subject, and b) collecting antibodies against the coronavirus immunogen from the non-human animal or human subject.
[74] The method of embodiment [73], further comprising administering an adjuvant to the non-human animal or human subject.
[75]A method of inducing an immune response in a subject against SARS-CoV-2, the method comprising administering to the subject the circular polyribonucleotide, linear polyribonucleotide, or immunogenic compositions of any one of embodiments [1]-[72].
[76]. A method of treating a subject who has or is suspected to have a SARS-CoV-2 infection, the method comprising administering to the subject the circular polyribonucleotide or immunogenic composition of any one of embodiments [1]-[72].
[77]A method of preventing a SARS-CoV-2 infection in a subject, the method comprising administering to the subject the circular polyribonucleotide or immunogenic composition of any one of embodiments [1]-[72].
[78] The method of embodiment [77], wherein the human subject is at risk for a SARS-CoV-2 infection.
[79] The method of embodiment [76] or [78], wherein the human subject is a human over 50 years old, an immune-compromised human, a human with a chronic health condition, or a health care worker.
[80] The method of any one of embodiments [77]-[79], wherein administering the circular polyribonucleotide or immunogenic composition decreases the frequency or severity of symptoms associated with a SARS-CoV-2 infection.
[81] The method of any one of embodiments [76]-[82], wherein the subject is a human subject.
[82] The method of any one of embodiments [76]-[82], further comprising administering an adjuvant to the subject.
[83] The method of any one of embodiments [76]-[82], further comprising administering a SARS-CoV-2 immunogen to the subject.

SEQUENCE LISTING

| SEQ | | |
|---|---|---|
| ID | | |
| NO: | Comment | Sequence |
| 11 | QHD42416.1 | atgtttgtttttcttgttttattgccactagtctctagtcagtgtgttaatcttacaaccagaactcaattaccccctgcatacactaattctttcacacgtggtgtttattaccctgaca |
| | | aagttttcagatcctcagttttacattcaactcaggacttgttcttacctttcttttccaatgttacttggttccatgctatacatgtctctgggaccaatggtactaagaggtttgataa |
| | | ccctgtcctaccatttaatgatggtgtttattttgcttccactgagaagtctaacataataagaggctggatttttggtactactttagattcgaagacccagtccctacttattgttaat |
| | | aacgctactaatgttgttattaaagtctgtgaatttcaattttgtaatgatccatttttgggtgtttattaccacaaaaacaacaaaagttggatggaaagtgagttcagagtttattcta |
| | | gtgcgaataattgcacttttgaatatgtctctcagccttttcttatggaccttgaaggaaaacagggtaatttcaaaaatcttagggaatttgtgtttaagaatattgatggttattttaa |
| | | aatatattctaagcacacgcctattaatttagtgcgtgatctccctcagggtttttcggctttagaaccattggtagatttgccaataggtattaacatcactaggtttcaaactttactt |
| | | gctttacatagaagttatttgactcctggtgattcttcttcaggttggacagctggtgctgcagcttattatgtgggttatcttcaacctaggacttttctattaaaatataatgaaaatg |
| | | gaaccattacagatgctgtagactgtgcacttgaccctctctcagaaacaaagtgtacgttgaaatccttcactgtagaaaaaggaatctatcaaacttctaactttagagtccaaccaac |
| | | agaatctattgttagatttcctaatattacaaacttgtgcccttttggtgaagtttttaacgccaccagatttgcatctgtttatgcttggaacaggaagagaatcagcaactgtgttgct |
| | | gattattctgtcctatataattccgcatcattttccacttttaagtgttatggagtgtctcctactaaattaaatgatctctgctttactaatgtctatgcagattcatttgtaattagag |
| | | gtgatgaagtcagacaaatcgctccagggcaaactggaaagattgctgattataattataaattaccagatgattttacaggctgcgttatagcttggaattctaacaatcttgattctaa |
| | | ggttggtggtaattataattacctgtatagattgtttaggaagtctaatctcaaaccttttgagagagatatttcaactgaaatctatcaggccggtagcacaccttgtaatggtgttgaa |
| | | ggttttaattgttactttcctttacaatcatatggtttccaacccactaatggtgttggttaccaaccatacagagtagtagtactttcttttgaacttctacatgcaccagcaactgttt |
| | | gtggacctaaaaagtctactaatttggttaaaaacaaatgtgtcaatttcaacttcaatggtttaacaggcacaggtgttcttactgagtctaacaaaaagtttctgcctttccaacaatt |
| | | tggcagagacattgctgacactactgatgctgtccgtgatccacagacacttgagattcttgacattacaccatgttcttttggtggtgtcagtgttataacaccaggaacaaatacttct |
| | | aaccaggttgctgttctttatcaggatgttaactgcacagaagtccctgttgctattcatgcagatcaacttactcctacttggcgtgtttattctacaggttctaatgtttttcaaacac |
| | | gtgcaggctgtttaataggggctgaacatgtcaacaactcatatgagtgtgacatacccattggtgcaggtatatgcgctagttatcagactcagactaattctcctcggcgggca |
| | | cgtagtgtagctagtcaatccatcattgcctacactatgtcacttggtgcagaaaattcagttgcttactctaataactctattgccatacccacaaattttactattagtgttaccaca |
| | | gaaattctaccagtgtctatgaccaagacatcagtagattgtacaatgtacatttgtggtgattcaactgaatgcagcaatcttttgttgcaatatggcagtttttgtacacaattaaa |
| | | ccgtgctttaactggaatagctgttgaacaagacaaaaacacccaagaagtttttgcacaagtcaaacaaatttacaaaacaccaccaattaaagattttggtggttttaattttt |
| | | cacaaatattaccagatccatcaaaaccaagcaagaggtcatttattgaagatctacttttcaacaaagtgacacttgcagatgctggcttcatcaaacaatatggtgattgcctt |
| | | ggtgatattgctgctagagacctcatttgtgcacaaaagtttaacggccttactgttttgccacctttgctcacagatgaaatgattgctcaatacacttctgcactgttagcgggtac |
| | | aatcacttctggttggacctttggtgcaggtgctgcattacaaataccatttgctatgcaaatggcttataggtttaatggtattggagttacacagaatgttctctatgagaaccaaa |
| | | aattgattgccaaccaatttaatagtgctattggcaaaattcaagactcactttcttccacagcaagtgcacttggaaaacttcaagatgtggtcaaccaaaatgcacaagcttta |
| | | aacacgcttgttaaacaacttagctccaattttggtgcaatttcaagtgttttaaatgatatcctttcacgtcttgacaaagttgaggctgaagtgcaaattgataggttgatcacagg |
| | | cagacttcaaagtttgcagacatatgtgactcaacaattaattagagctgcagaaatcagagcttctgctaatcttgctgctactaaaatgtcagagtgtgtacttggacaatcaa |
| | | aaagagttgatttttgtggaaagggctatcatcttatgtccttccctcagtcagcacctcatggtgtagtcttcttgcatgtgacttatgtccctgcacaagaaaagaacttcacaact |
| | | gctcctgccatttgtcatgatggaaaagcacactttcctcgtgaaggtgtctttgtttcaaatggcacacactggtttgtaacacaaaggaatttttatgaaccacaaatcattacta |
| | | cagacaacacatttgtgtctggtaactgtgatgttgtaataggaattgtcaacaacacagtttatgatcctttgcaacctgaattagactcattcaaggaggagttagataaatattt |
| | | taagaatcatacatcaccagatgttgatttaggtgacatctctggcattaatgcttcagttgtaaacattcaaaaagaaattgaccgcctcaatgaggttgccaagaatttaaatg |
| | | aatctctcatcgatctccaagaacttggaaagtatgagcagtatataaaatggccatggtacatttggctaggttttatagctggcttgattgccatagtaatggtgacaattatgctt |
| | | tgctgtatgaccagttgctgtagttgtctcaagggctgttgttcttgtggatcctgctgcaaatttgatgaagacgactctgagccagtgctcaaaggagtcaaattacattacacat |
| | | aa |
| 12 | p1 | AGATTATCAAAAAGGATCTTCACCTAGATCCTTTTAAATTAAAAATGAAGTTTTAAATCAATCTAAAGTATATATGAGTAA |
| | | ACTTGGTCTGACAGTTATTAGAAAAATTCATCCAGCAGACGATAAAACGCAATACGCTGGCTATCCGGTGCCGCAATG |
| | | CCATACAGCACCAGAAAACGATCCGCCCATTCGCCGCCCAGTTCTTCCGCAATATCACGGGTGGCCAGCGCAATATC |
| | | CTGATAACGATCCGCCACGCCCAGACGGCCGCAATCAATAAAGCCGCTAAAACGGCCATTTTCCACCATAATGTTCG |
| | | GCAGGCACGCATCACCATGGGTCACCACCAGATCTTCGCCATCCGGCATGCTCGCTTTCAGACGCGCAAACAGCTCT |
| | | GCCGGTGCCAGGCCCTGATGTTCTTCATCCAGATCATCCTGATCCACCAGGCCCGCTTCCATACGGGTACGCGCACG |
| | | TTCAATACGATGTTTCGCCTGATGATCAAACGGACAGGTCGCCGGGTCCAGGGTATGCAGACGACGCATGGCATCCG |
| | | CCATAATGCTCACTTTTTCTGCCGGCGCCAGATGGCTAGACAGCAGATCCTGACCCGGCACTTCGCCCAGCAGCAGC |
| | | CAATCACGGCCCGCTTCGGTCACCACATCCAGCACCGCCGCACACGGAACACCGGTGGTGGCCAGCCAGCTCAGAC |
| | | GCGCCGCTTCATCCTGCAGCTCGTTCAGCGCACCGCTCAGATCGGTTTTCACAAACAGCACCGGACGACCCTGCGC |
| | | GCTCAGACGAAACACCGCCGCATCAGAGCAGCCAATGGTCTGCTGCGCCCAATCATAGCCAAACAGACGTTCCACCC |
| | | ACGCTGCCGGGCTACCCGCATGCAGGCCATCCTGTTCAATCATACTCTTCCTTTTTCAATATTATTGAAGCATTTATCA |
| | | GGGTTATTGTCTCATGAGCGGATACATATTTGAATGTATTTAGAAAAATAAACAAATAGGGGTTCCGCGCACATTTCCC |
| | | CGAAAAGTGCCACCTAAATTGTAAGCGTTAATATTTTGTTAAAATTCGCGTTAAATTTTTGTTAAATCAGCTCATTTTTTA |
| | | ACCAATAGGCCGAAATCGGCAAAATCCCTTATAAATCAAAAGAATAGACCGAGATAGGGTTGAGTGGCCGCTACAGG |
| | | GCGCTCCCATTCGCCATTCAGGCTGCGCAACTGTTGGGAAGGGCGTTTCGGTGCGGGCCTCTTCGCTATTACGCCA |
| | | GCTGGCGAAAGGGGGATGTGCTGCAAGGCGATTAAGTTGGGTAACGCCAGGGTTTTCCCAGTCACGACGTTGTAAAA |
| | | CGACGGCCAGTGAGCGCGACGTAATACGACTCACTATAGGGCGAATTGAAGGAAGGCCGTCAAGGCCGCATGGGAA |
| | | GCCCTCGACCGTCGATTGTCCACTGGTCAACAATAGATGACTTACAACTAATCGGAAGGTGCAGAGACTCGACGGGA |
| | | GCTACCCTAACGTCAAGACGAGGGTAAAGAGAGAGTCCAATTCTCAAAGCCAATAGGCAGTAGCGAAAGCTGCAAGA |
| | | GAATGAAAATCCGTTGACCTTAAACGGTCGTGTGGGTTCAAGTCCCTCCACCCCCACGCCGGAAACGCAATAGCCGA |
| | | AAAACAAAAAACAAAAAAAACAAAAAAAAAACCAAAAAAACAAAACACAacgttactggccgaagccgcttggaataaggccggtgtgcgttt |
| | | gtctatatgttattttccaccatattgccgtcttttggcaatgtgagggcccggaaacctggccctgtcttcttgacgagcattcctaggggtctttcccctctcgccaaaggaatgca |
| | | aggtctgttgaatgtcgtgaaggaagcagttcctctggaagcttcttgaagacaaacaacgtctgtagcgaccctttgcaggcagcggaaccccccacctggcgacaggtgc |
| | | ctctgcggccaaaagccacgtgtataagatacacctgcaaaggcggcacaaccccagtgccacgttgtgagttggatagttgtggaaagagtcaaatggctctcctcaagc |
| | | gtattcaacaaggggctgaaggatgcccagaaggtaccccattgtatgggatctgatctggggcctcggtgcacatgctttacatgtgtttagtcgaggttaaaaaacgtctag |
| | | gccccccgaaccacggggacgtggttttcctttgaaaaacacgatgataataGCCACCatgtttgtttttcttgttttattgccactagtctctagtcagtgtgttaatcttacaacc |
| | | agaactcaattaccccctgcatacactaattctttcacacgtggtgtttattaccctgacaaagttttcagatcctcagttttacattcaactcaggacttgttcttacctttcttttcca |
| | | atgttacttggttccatgctatacatgtctctgggaccaatggtactaagaggtttgataaccctgtcctaccatttaatgatggtgtttattttgcttccactgagaagtctaacataat |
| | | aagaggctggatttttggtactactttagattcgaagacccagtccctacttattgttaataacgctactaatgttgttattaaagtctgtgaatttcaattttgtaatgatccatttttg |
| | | ggtgtttattaccacaaaaacaacaaaagttggatggaaagtgagttcagagtttattctagtgcgaataattgcacttttgaatatgtctctcagccttttcttatggaccttgaaggaaa |
| | | acagggtaatttcaaaaatcttagggaatttgtgtttaagaatattgatggttattttaaaatatattctaagcacacgcctattaatttagtgcgtgatctccctcagggtttttcggctt |
| | | tagaaccattggtagatttgccaataggtattaacatcactaggtttcaaactttacttgctttacatagaagttatttgactcctggtgattcttcttcaggttggacagctggtgctgca |
| | | gcttattatgtgggttatcttcaacctaggacttttctattaaaatataatgaaaatggaaccattacagatgctgtagactgtgcacttgaccctctctcagaaacaaagtgtacgttga |
| | | aatccttcactgtagaaaaaggaatctatcaaacttctaactttagagtccaaccaacagaatctattgttagatttcctaatattacaaacttgtgcccttttggtgaagtttttaacg |
| | | ccaccagatttgcatctgtttatgcttggaacaggaagagaatcagcaactgtgttgctgattattctgtcctatataattccgcatcattttccacttttaagtgttatggagtgtctcct |
| | | actaaattaaatgatctctgctttactaatgtctatgcagattcatttgtaattagaggtgatgaagtcagacaaatcgctccagggcaaactggaaagattgctgattataattata |
| | | aattaccagatgattttacaggctgcgttatagcttggaattctaacaatcttgattctaaggttggtggtaattataattacctgtatagattgtttaggaagtctaatctcaaacctttt |
| | | gagagagatatttcaactgaaatctatcaggccggtagcacaccttgtaatggtgttgaaggttttaattgttactttcctttacaatcatatggtttccaacccactaatggtgttggtt |
| | | accaaccatacagagtagtagtactttcttttgaacttctacatgcaccagcaactgtttgtggacctaaaaagtctactaatttggttaaaaacaaatgtgtcaatttcaacttcaat |
| | | ggtttaacaggcacaggtgttcttactgagtctaacaaaaagtttctgcctttccaacaatttggcagagacattgctgacactactgatgctgtccgtgatccacagacacttga |
| | | gattcttgacattacaccatgttcttttggtggtgtcagtgttataacaccaggaacaaatacttctaaccaggttgctgttctttatcaggatgttaactgcacagaagtccctgttgct |
| | | attcatgcagatcaacttactcctacttggcgtgtttattctacaggttctaatgtttttcaaacacgtgcaggctgtttaataggggctgaacatgtcaacaactcatatgagtgtgac |
| | | atacccattggtgcaggtatatgcgctagttatcagactcagactaattctcctggcagcgccagcagtgtagctagtcaatccatcattgcctacactatgtcacttggtgcaga |
| | | aaattcagttgcttactctaataactctattgccatacccacaaattttactattagtgttaccacagaaattctaccagtgtctatgaccaagacatcagtagattgtacaatgtaca |
| | | tttgtggtgattcaactgaatgcagcaatcttttgttgcaatatggcagtttttgtacacaattaaaccgtgctttaactggaatagctgttgaacaagacaaaaacacccaagaag |
| | | tttttgcacaagtcaaacaaatttacaaaacaccaccaattaaagattttggtggttttaatttttcacaaatattaccagatccatcaaaaccaagcaagaggtcatttattgaag |
| | | atctacttttcaacaaagtgacacttgcagatgctggcttcatcaaacaatatggtgattgccttggtgatattgctgctagggacctcatttgtgcacaaaagtttaacggccttact |
| | | gttttgccacctttgctcacagatgaaatgattgctcaatacacttctgcactgttagcgggtacaatcacttctggttggacctttggtgcaggtgctgcattacaaataccatttgct |
| | | atgcaaatggcttataggtttaatggtattggagttacacagaatgttctctatgagaaccaaaaattgattgccaaccaatttaatagtgctattggcaaaattcaagactcacttt |
| | | cttccacagcaagtgcacttggaaaacttcaagatgtggtcaaccaaaatgcacaagctttaaacacgcttgttaaacaacttagctccaattttggtgcaatttcaagtgttttaa |
| | | atgatatcctttcacgtcttgaccctcccgaggctgaagtgcaaattgataggttgatcacaggcagacttcaaagtttgcagacatatgtgactcaacaattaattagagctgca |
| | | gaaatcagagcttctgctaatcttgctgctactaaaatgtcagagtgtgtacttggacaatcaaaaagagttgatttttgtggaaagggctatcatcttatgtccttccctcagtcag |
| | | cacctcatggtgtagtcttcttgcatgtgacttatgtccctgcacaagaaaagaacttcacaactgctcctgccatttgtcatgatggaaaagcacactttcctcgtgaaggtgtcttt |
| | | gtttcaaatggcacacactggtttgtaacacaaaggaatttttatgaaccacaaatcattactacagacaacacatttgtgtctggtaactgtgatgttgtaataggaattgtcaac |
| | | aacacagtttatgatcctttgcaacctgaattagactcattcaaggaggagttagataaatattttaagaatcatacatcaccagatgttgatttaggtgacatctctggcattaatg |
| | | cttcagttgtaaacattcaaaaagaaattgaccgcctcaatgaggttgccaagaatttaaatgaatctctcatcgatctccaagaacttggaaagtatgagcagGGGTATA |
| | | TCCCTGAAGCCCCCAGGGACGGCCAGGCTTACGTCAGAAAGGATGGAGAGTGGGTGCTCTTGAGCACCTTCCTGTA |
| | | AAAAAAACAAAAAACAAAACGGCTATTATGCGTTACCGGCGAGACGCTACGGACTTAAATAATTGAGCCTTAAAGAAG |
| | | AAATTCTTTAAGTGGATGCTCTCAAACTCAGGGAAACCTAAATCTAGTTATAGACAAGGCAATCCTGAGCCAAGCCGA |
| | | AGTAGTAATTAGTAAGACCAGTGGACAATCGACGGATAACAGCATATCTAGCTGGGCCTCATGGGCCTTCCTTTCACT |
| | | GCCCGCTTTCCAGTCGGGAAACCTGTCGTGCCAGCTGCATTAACATGGTCATAGCTGTTTCCTTGCGTATTGGGCGC |
| | | TCTCCGCTTCCTCGCTCACTGACTCGCTGCGCTCGGTCGTTCGGGTAAAGCCTGGGGTGCCTAATGAGCAAAAGGCC |
| | | AGCAAAAGGCCAGGAACCGTAAAAAGGCCGCGTTGCTGGCGTTTTTCCATAGGCTCCGCCCCCCTGACGAGCATCAC |
| | | AAAAATCGACGCTCAAGTCAGAGGTGGCGAAACCCGACAGGACTATAAAGATACCAGGCGTTTCCCCCTGGAAGCTC |
| | | CCTCGTGCGCTCTCCTGTTCCGACCCTGCCGCTTACCGGATACCTGTCCGCCTTTCTCCCTTCGGGAAGCGTGGCGC |
| | | TTTCTCATAGCTCACGCTGTAGGTATCTCAGTTCGGTGTAGGTCGTTCGCTCCAAGCTGGGCTGTGTGCACGAACCC |
| | | CCCGTTCAGCCCGACCGCTGCGCCTTATCCGGTAACTATCGTCTTGAGTCCAACCCGGTAAGACACGACTTATCGCC |
| | | ACTGGCAGCAGCCACTGGTAACAGGATTAGCAGAGCGAGGTATGTAGGCGGTGCTACAGAGTTCTTGAAGTGGTGG |
| | | CCTAACTACGGCTACACTAGAAGAACAGTATTTGGTATCTGCGCTCTGCTGAAGCCAGTTACCTTCGGAAAAAGAGTT |
| | | GGTAGCTCTTGATCCGGCAAACAAACCACCGCTGGTAGCGGTGGTTTTTTTGTTTGCAAGCAGCAGATTACGCGCAG |
| | | AAAAAAAGGATCTCAAGAAGATCCTTTGATCTTTTCTACGGGGTCTGACGCTCAGTGGAACGAAAACTCACGTTAAGG |
| | | GATTTTGGTCATG |
| 13 | ORF1 | atgtttgtttttcttgttttattgccactagtctctagtcagtgtgttaatcttacaaccagaactcaattaccccctgcatacactaattctttcacacgtggtgtttattaccctgacaa |
| | | agttttcagatcctcagttttacattcaactcaggacttgttcttacctttcttttccaatgttacttggttccatgctatacatgtctctgggaccaatggtactaagaggtttgataacc |
| | | ctgtcctaccatttaatgatggtgtttattttgcttccactgagaagtctaacataataagaggctggatttttggtactactttagattcgaagacccagtccctacttattgttaataac |
| | | gctactaatgttgttattaaagtctgtgaatttcaattttgtaatgatccatttttgggtgtttattaccacaaaaacaacaaaagttggatggaaagtgagttcagagtttattctagtgc |
| | | gaataattgcacttttgaatatgtctctcagccttttcttatggaccttgaaggaaaacagggtaatttcaaaaatcttagggaatttgtgtttaagaatattgatggttattttaaaatat |
| | | attctaagcacacgcctattaatttagtgcgtgatctccctcagggtttttcggctttagaaccattggtagatttgccaataggtattaacatcactaggtttcaaactttacttgcttta |
| | | catagaagttatttgactcctggtgattcttcttcaggttggacagctggtgctgcagcttattatgtgggttatcttcaacctaggacttttctattaaaatataatgaaaatggaaccat |
| | | tacagatgctgtagactgtgcacttgaccctctctcagaaacaaagtgtacgttgaaatccttcactgtagaaaaaggaatctatcaaacttctaactttagagtccaaccaacaga |
| | | atctattgttagatttcctaatattacaaacttgtgcccttttggtgaagtttttaacgccaccagatttgcatctgtttatgcttggaacaggaagagaatcagcaactgtgttgctgatt |
| | | attctgtcctatataattccgcatcattttccacttttaagtgttatggagtgtctcctactaaattaaatgatctctgctttactaatgtctatgcagattcatttgtaattagaggtgat |
| | | gaagtcagacaaatcgctccagggcaaactggaaagattgctgattataattataaattaccagatgattttacaggctgcgttatagcttggaattctaacaatcttgattctaaggttg |
| | | gtggtaattataattacctgtatagattgtttaggaagtctaatctcaaaccttttgagagagatatttcaactgaaatctatcaggccggtagcacaccttgtaatggtgttgaaggt |
| | | tttaattgttactttcctttacaatcatatggtttccaacccactaatggtgttggttaccaaccatacagagtagtagtactttcttttgaacttctacatgcaccagcaactgtttgtgg |
| | | acctaaaaagtctactaatttggttaaaaacaaatgtgtcaatttcaacttcaatggtttaacaggcacaggtgttcttactgagtctaacaaaaagtttctgcctttccaacaatttgg |
| | | cagagacattgctgacactactgatgctgtccgtgatccacagacacttgagattcttgacattacaccatgttcttttggtggtgtcagtgttataacaccaggaacaaatacttct |
| | | aaccaggttgctgttctttatcaggatgttaactgcacagaagtccctgttgctattcatgcagatcaacttactcctacttggcgtgtttattctacaggttctaatgtttttcaaacacg |
| | | tgcaggctgtttaataggggctgaacatgtcaacaactcatatgagtgtgacatacccattggtgcaggtatatgcgctagttatcagactcagactaattctcctggcagcgcc |
| | | agcagtgtagctagtcaatccatcattgcctacactatgtcacttggtgcagaaaattcagttgcttactctaataactctattgccatacccacaaattttactattagtgttaccaca |
| | | gaaattctaccagtgtctatgaccaagacatcagtagattgtacaatgtacatttgtggtgattcaactgaatgcagcaatcttttgttgcaatatggcagtttttgtacacaattaaa |
| | | ccgtgctttaactggaatagctgttgaacaagacaaaaacacccaagaagtttttgcacaagtcaaacaaatttacaaaacaccaccaattaaagattttggtggttttaattttt |
| | | cacaaatattaccagatccatcaaaaccaagcaagaggtcatttattgaagatctacttttcaacaaagtgacacttgcagatgctggcttcatcaaacaatatggtgattgcctt |
| | | ggtgatattgctgctagggacctcatttgtgcacaaaagtttaacggccttactgttttgccacctttgctcacagatgaaatgattgctcaatacacttctgcactgttagcgggtac |
| | | aatcacttctggttggacctttggtgcaggtgctgcattacaaataccatttgctatgcaaatggcttataggtttaatggtattggagttacacagaatgttctctatgagaaccaaa |
| | | aattgattgccaaccaatttaatagtgctattggcaaaattcaagactcactttcttccacagcaagtgcacttggaaaacttcaagatgtggtcaaccaaaatgcacaagcttta |
| | | aacacgcttgttaaacaacttagctccaattttggtgcaatttcaagtgttttaaatgatatcctttcacgtcttgaccctcccgaggctgaagtgcaaattgataggttgatcacagg |
| | | cagacttcaaagtttgcagacatatgtgactcaacaattaattagagctgcagaaatcagagcttctgctaatcttgctgctactaaaatgtcagagtgtgtacttggacaatcaa |
| | | aaagagttgatttttgtggaaagggctatcatcttatgtccttccctcagtcagcacctcatggtgtagtcttcttgcatgtgacttatgtccctgcacaagaaaagaacttcacaact |
| | | gctcctgccatttgtcatgatggaaaagcacactttcctcgtgaaggtgtctttgtttcaaatggcacacactggtttgtaacacaaaggaatttttatgaaccacaaatcattacta |
| | | cagacaacacatttgtgtctggtaactgtgatgttgtaataggaattgtcaacaacacagtttatgatcctttgcaacctgaattagactcattcaaggaggagttagataaatattt |
| | | taagaatcatacatcaccagatgttgatttaggtgacatctctggcattaatgcttcagttgtaaacattcaaaaagaaattgaccgcctcaatgaggttgccaagaatttaaatg |
| | | aatctctcatcgatctccaagaacttggaaagtatgagcagGGGTATATCCCTGAAGCCCCCAGGGACGGCCAGGCTTACGTCAGAAAG |
| | | GATGGAGAGTGGGTGCTCTTGAGCACCTTCCTGTAA |
| 14 | p3 | AGATTATCAAAAAGGATCTTCACCTAGATCCTTTTAAATTAAAAATGAAGTTTTAAATCAATCTAAAGTATATATGAGTAA |
| | | ACTTGGTCTGACAGTTATTAGAAAAATTCATCCAGCAGACGATAAAACGCAATACGCTGGCTATCCGGTGCCGCAATG |
| | | CCATACAGCACCAGAAAACGATCCGCCCATTCGCCGCCCAGTTCTTCCGCAATATCACGGGTGGCCAGCGCAATATC |
| | | CTGATAACGATCCGCCACGCCCAGACGGCCGCAATCAATAAAGCCGCTAAAACGGCCATTTTCCACCATAATGTTCG |
| | | GCAGGCACGCATCACCATGGGTCACCACCAGATCTTCGCCATCCGGCATGCTCGCTTTCAGACGCGCAAACAGCTCT |
| | | GCCGGTGCCAGGCCCTGATGTTCTTCATCCAGATCATCCTGATCCACCAGGCCCGCTTCCATACGGGTACGCGCACG |
| | | TTCAATACGATGTTTCGCCTGATGATCAAACGGACAGGTCGCCGGGTCCAGGGTATGCAGACGACGCATGGCATCCG |
| | | CCATAATGCTCACTTTTTCTGCCGGCGCCAGATGGCTAGACAGCAGATCCTGACCCGGCACTTCGCCCAGCAGCAGC |
| | | CAATCACGGCCCGCTTCGGTCACCACATCCAGCACCGCCGCACACGGAACACCGGTGGTGGCCAGCCAGCTCAGAC |
| | | GCGCCGCTTCATCCTGCAGCTCGTTCAGCGCACCGCTCAGATCGGTTTTCACAAACAGCACCGGACGACCCTGCGC |
| | | GCTCAGACGAAACACCGCCGCATCAGAGCAGCCAATGGTCTGCTGCGCCCAATCATAGCCAAACAGACGTTCCACCC |
| | | ACGCTGCCGGGCTACCCGCATGCAGGCCATCCTGTTCAATCATACTCTTCCTTTTTCAATATTATTGAAGCATTTATCA |
| | | GGGTTATTGTCTCATGAGCGGATACATATTTGAATGTATTTAGAAAAATAAACAAATAGGGGTTCCGCGCACATTTCCC |
| | | CGAAAAGTGCCACCTAAATTGTAAGCGTTAATATTTTGTTAAAATTCGCGTTAAATTTTTGTTAAATCAGCTCATTTTTTA |
| | | ACCAATAGGCCGAAATCGGCAAAATCCCTTATAAATCAAAAGAATAGACCGAGATAGGGTTGAGTGGCCGCTACAGG |
| | | GCGCTCCCATTCGCCATTCAGGCTGCGCAACTGTTGGGAAGGGCGTTTCGGTGCGGGCCTCTTCGCTATTACGCCA |
| | | GCTGGCGAAAGGGGGATGTGCTGCAAGGCGATTAAGTTGGGTAACGCCAGGGTTTTCCCAGTCACGACGTTGTAAAA |
| | | CGACGGCCAGTGAGCGCGACGTAATACGACTCACTATAGGGCGAATTGAAGGAAGGCCGTCAAGGCCGCATGGGAA |
| | | GCCCTCGACCGTCGATTGTCCACTGGTCAACAATAGATGACTTACAACTAATCGGAAGGTGCAGAGACTCGACGGGA |
| | | GCTACCCTAACGTCAAGACGAGGGTAAAGAGAGAGTCCAATTCTCAAAGCCAATAGGCAGTAGCGAAAGCTGCAAGA |
| | | GAATGAAAATCCGTTGACCTTAAACGGTCGTGTGGGTTCAAGTCCCTCCACCCCCACGCCGGAAACGCAATAGCCGA |
| | | AAAACAAAAAACAAAAAAAACAAAAAAAAAACCAAAAAAACAAAACACAacgttactggccgaagccgcttggaataaggccggtgtgcgttt |
| | | gtctatatgttattttccaccatattgccgtcttttggcaatgtgagggcccggaaacctggccctgtcttcttgacgagcattcctaggggtctttcccctctcgccaaaggaatgca |
| | | aggtctgttgaatgtcgtgaaggaagcagttcctctggaagcttcttgaagacaaacaacgtctgtagcgaccctttgcaggcagcggaaccccccacctggcgacaggtgc |
| | | ctctgcggccaaaagccacgtgtataagatacacctgcaaaggcggcacaaccccagtgccacgttgtgagttggatagttgtggaaagagtcaaatggctctcctcaagc |
| | | gtattcaacaaggggctgaaggatgcccagaaggtaccccattgtatgggatctgatctggggcctcggtgcacatgctttacatgtgtttagtcgaggttaaaaaacgtctag |
| | | gccccccgaaccacggggacgtggttttcctttgaaaaacacgatgataataGCCACCatgtttgtttttcttgttttattgccactagtctctagtcagtgtgttaatcttacaacc |
| | | agaactcaattaccccctgcatacactaattctttcacacgtggtgtttattaccctgacaaagttttcagatcctcagttttacattcaactcaggacttgttcttacctttcttttccaa |
| | | tgttacttggttccatgctatacatgtctctgggaccaatggtactaagaggtttgataaccctgtcctaccatttaatgatggtgtttattttgcttccactgagaagtctaacataataa |
| | | gaggctggatttttggtactactttagattcgaagacccagtccctacttattgttaataacgctactaatgttgttattaaagtctgtgaatttcaattttgtaatgatccatttttgggt |
| | | gtttattaccacaaaaacaacaaaagttggatggaaagtgagttcagagtttattctagtgcgaataattgcacttttgaatatgtctctcagccttttcttatggaccttgaaggaaaac |
| | | agggtaatttcaaaaatcttagggaatttgtgtttaagaatattgatggttattttaaaatatattctaagcacacgcctattaatttagtgcgtgatctccctcagggtttttcggcttta |
| | | gaaccattggtagatttgccaataggtattaacatcactaggtttcaaactttacttgctttacatagaagttatttgactcctggtgattcttcttcaggttggacagctggtgctgcagc |
| | | ttattatgtgggttatcttcaacctaggacttttctattaaaatataatgaaaatggaaccattacagatgctgtagactgtgcacttgaccctctctcagaaacaaagtgtacgttga |
| | | aatccttcactgtagaaaaaggaatctatcaaacttctaactttagagtccaaccaacagaatctattgttagatttcctaatattacaaacttgtgcccttttggtgaagtttttaacg |
| | | ccaccagatttgcatctgtttatgcttggaacaggaagagaatcagcaactgtgttgctgattattctgtcctatataattccgcatcattttccacttttaagtgttatggagtgtctcct |
| | | actaaattaaatgatctctgctttactaatgtctatgcagattcatttgtaattagaggtgatgaagtcagacaaatcgctccagggcaaactggaaagattgctgattataattata |
| | | aattaccagatgattttacaggctgcgttatagcttggaattctaacaatcttgattctaaggttggtggtaattataattacctgtatagattgtttaggaagtctaatctcaaacctttt |
| | | gagagagatatttcaactgaaatctatcaggccggtagcacaccttgtaatggtgttgaaggttttaattgttactttcctttacaatcatatggtttccaacccactaatggtgttggtt |
| | | accaaccatacagagtagtagtactttcttttgaacttctacatgcaccagcaactgtttgtggacctaaaaagtctactaatttggttaaaaacaaatgtgtcaatttcaacttcaat |
| | | ggtttaacaggcacaggtgttcttactgagtctaacaaaaagtttctgcctttccaacaatttggcagagacattgctgacactactgatgctgtccgtgatccacagacacttga |
| | | gattcttgacattacaccatgttcttttggtggtgtcagtgttataacaccaggaacaaatacttctaaccaggttgctgttctttatcaggatgttaactgcacagaagtccctgttgct |
| | | attcatgcagatcaacttactcctacttggcgtgtttattctacaggttctaatgtttttcaaacacgtgcaggctgtttaataggggctgaacatgtcaacaactcatatgagtgtgac |
| | | atacccattggtgcaggtatatgcgctagttatcagactcagactaattctcctggcagcgccagcagtgtagctagtcaatccatcattgcctacactatgtcacttggtgcaga |
| | | aaattcagttgcttactctaataactctattgccatacccacaaattttactattagtgttaccacagaaattctaccagtgtctatgaccaagacatcagtagattgtacaatgtaca |
| | | tttgtggtgattcaactgaatgcagcaatcttttgttgcaatatggcagtttttgtacacaattaaaccgtgctttaactggaatagctgttgaacaagacaaaaacacccaagaag |
| | | tttttgcacaagtcaaacaaatttacaaaacaccaccaattaaagattttggtggttttaatttttcacaaatattaccagatccatcaaaaccaagcaagaggtcatttattgaag |
| | | atctacttttcaacaaagtgacacttgcagatgctggcttcatcaaacaatatggtgattgccttggtgatattgctgctagggacctcatttgtgcacaaaagtttaacggccttact |
| | | gttttgccacctttgctcacagatgaaatgattgctcaatacacttctgcactgttagcgggtacaatcacttctggttggacctttggtgcaggtgctgcattacaaataccatttgct |
| | | atgcaaatggcttataggtttaatggtattggagttacacagaatgttctctatgagaaccaaaaattgattgccaaccaatttaatagtgctattggcaaaattcaagactcacttt |
| | | cttccacagcaagtgcacttggaaaacttcaagatgtggtcaaccaaaatgcacaagctttaaacacgcttgttaaacaacttagctccaattttggtgcaatttcaagtgttttaa |
| | | atgatatcctttcacgtcttgaccctcccgaggctgaagtgcaaattgataggttgatcacaggcagacttcaaagtttgcagacatatgtgactcaacaattaattagagctgca |
| | | gaaatcagagcttctgctaatcttgctgctactaaaatgtcagagtgtgtacttggacaatcaaaaagagttgatttttgtggaaagggctatcatcttatgtccttccctcagtcag |
| | | cacctcatggtgtagtcttcttgcatgtgacttatgtccctgcacaagaaaagaacttcacaactgctcctgccatttgtcatgatggaaaagcacactttcctcgtgaaggtgtcttt |
| | | gtttcaaatggcacacactggtttgtaacacaaaggaatttttatgaaccacaaatcattactacagacaacacatttgtgtctggtaactgtgatgttgtaataggaattgtcaac |
| | | aacacagtttatgatcctttgcaacctgaattagactcattcaaggaggagttagataaatattttaagaatcatacatcaccagatgttgatttaggtgacatctctggcattaatg |
| | | cttcagttgtaaacattcaaaaagaaattgaccgcctcaatgaggttgccaagaatttaaatgaatctctcatcgatctccaagaacttggaaagtatgagcagtatataaaatg |
| | | gccatggtacatttggctaggttttatagctggcttgattgccatagtaatggtgacaattatgctttgctgtatgaccagttgctgtagttgtctcaagggctgttgttcttgtggatcctg |
| | | ctgcaaatttgatgaagacgactctgagccagtgctcaaaggagtcaaattacattacacaTAAAAAAAACAAAAAACAAAACGGCTATTATGCGTT |
| | | ACCGGCGAGACGCTACGGACTTAAATAATTGAGCCTTAAAGAAGAAATTCTTTAAGTGGATGCTCTCAAACTCAGGGA |
| | | AACCTAAATCTAGTTATAGACAAGGCAATCCTGAGCCAAGCCGAAGTAGTAATTAGTAAGACCAGTGGACAATCGACG |
| | | GATAACAGCATATCTAGCTGGGCCTCATGGGCCTTCCTTTCACTGCCCGCTTTCCAGTCGGGAAACCTGTCGTGCCA |
| | | GCTGCATTAACATGGTCATAGCTGTTTCCTTGCGTATTGGGCGCTCTCCGCTTCCTCGCTCACTGACTCGCTGCGCTC |
| | | GGTCGTTCGGGTAAAGCCTGGGGTGCCTAATGAGCAAAAGGCCAGCAAAAGGCCAGGAACCGTAAAAAGGCCGCGT |
| | | TGCTGGCGTTTTTCCATAGGCTCCGCCCCCCTGACGAGCATCACAAAAATCGACGCTCAAGTCAGAGGTGGCGAAAC |
| | | CCGACAGGACTATAAAGATACCAGGCGTTTCCCCCTGGAAGCTCCCTCGTGCGCTCTCCTGTTCCGACCCTGCCGCT |
| | | TACCGGATACCTGTCCGCCTTTCTCCCTTCGGGAAGCGTGGCGCTTTCTCATAGCTCACGCTGTAGGTATCTCAGTTC |
| | | GGTGTAGGTCGTTCGCTCCAAGCTGGGCTGTGTGCACGAACCCCCCGTTCAGCCCGACCGCTGCGCCTTATCCGGT |
| | | AACTATCGTCTTGAGTCCAACCCGGTAAGACACGACTTATCGCCACTGGCAGCAGCCACTGGTAACAGGATTAGCAG |
| | | AGCGAGGTATGTAGGCGGTGCTACAGAGTTCTTGAAGTGGTGGCCTAACTACGGCTACACTAGAAGAACAGTATTTG |
| | | GTATCTGCGCTCTGCTGAAGCCAGTTACCTTCGGAAAAAGAGTTGGTAGCTCTTGATCCGGCAAACAAACCACCGCT |
| | | GGTAGCGGTGGTTTTTTTGTTTGCAAGCAGCAGATTACGCGCAGAAAAAAAGGATCTCAAGAAGATCCTTTGATCTTTT |
| | | CTACGGGGTCTGACGCTCAGTGGAACGAAAACTCACGTTAAGGGATTTTGGTCATG |
| 15 | ORF3 | atgtttgtttttcttgttttattgccactagtctctagtcagtgtgttaatcttacaaccagaactcaattaccccctgcatacactaattctttcacacgtggtgtttattaccctgacaa |
| | | agttttcagatcctcagttttacattcaactcaggacttgttcttacctttcttttccaatgttacttggttccatgctatacatgtctctgggaccaatggtactaagaggtttgataacc |
| | | ctgtcctaccatttaatgatggtgtttattttgcttccactgagaagtctaacataataagaggctggatttttggtactactttagattcgaagacccagtccctacttattgttaataac |
| | | gctactaatgttgttattaaagtctgtgaatttcaattttgtaatgatccatttttgggtgtttattaccacaaaaacaacaaaagttggatggaaagtgagttcagagtttattctagtgc |
| | | gaataattgcacttttgaatatgtctctcagccttttcttatggaccttgaaggaaaacagggtaatttcaaaaatcttagggaatttgtgtttaagaatattgatggttattttaaaatat |
| | | attctaagcacacgcctattaatttagtgcgtgatctccctcagggtttttcggctttagaaccattggtagatttgccaataggtattaacatcactaggtttcaaactttacttgcttta |
| | | catagaagttatttgactcctggtgattcttcttcaggttggacagctggtgctgcagcttattatgtgggttatcttcaacctaggacttttctattaaaatataatgaaaatggaaccat |
| | | tacagatgctgtagactgtgcacttgaccctctctcagaaacaaagtgtacgttgaaatccttcactgtagaaaaaggaatctatcaaacttctaactttagagtccaaccaacaga |
| | | atctattgttagatttcctaatattacaaacttgtgcccttttggtgaagtttttaacgccaccagatttgcatctgtttatgcttggaacaggaagagaatcagcaactgtgttgctgatt |
| | | attctgtcctatataattccgcatcattttccacttttaagtgttatggagtgtctcctactaaattaaatgatctctgctttactaatgtctatgcagattcatttgtaattagaggtgat |
| | | gaagtcagacaaatcgctccagggcaaactggaaagattgctgattataattataaattaccagatgattttacaggctgcgttatagcttggaattctaacaatcttgattctaaggttg |
| | | gtggtaattataattacctgtatagattgtttaggaagtctaatctcaaaccttttgagagagatatttcaactgaaatctatcaggccggtagcacaccttgtaatggtgttgaaggt |
| | | tttaattgttactttcctttacaatcatatggtttccaacccactaatggtgttggttaccaaccatacagagtagtagtactttcttttgaacttctacatgcaccagcaactgtttgtgg |
| | | acctaaaaagtctactaatttggttaaaaacaaatgtgtcaatttcaacttcaatggtttaacaggcacaggtgttcttactgagtctaacaaaaagtttctgcctttccaacaatttgg |
| | | cagagacattgctgacactactgatgctgtccgtgatccacagacacttgagattcttgacattacaccatgttcttttggtggtgtcagtgttataacaccaggaacaaatacttct |
| | | aaccaggttgctgttctttatcaggatgttaactgcacagaagtccctgttgctattcatgcagatcaacttactcctacttggcgtgtttattctacaggttctaatgtttttcaaacacg |
| | | tgcaggctgtttaataggggctgaacatgtcaacaactcatatgagtgtgacatacccattggtgcaggtatatgcgctagttatcagactcagactaattctcctggcagcgcc |
| | | agcagtgtagctagtcaatccatcattgcctacactatgtcacttggtgcagaaaattcagttgcttactctaataactctattgccatacccacaaattttactattagtgttaccaca |
| | | gaaattctaccagtgtctatgaccaagacatcagtagattgtacaatgtacatttgtggtgattcaactgaatgcagcaatcttttgttgcaatatggcagtttttgtacacaattaaa |
| | | ccgtgctttaactggaatagctgttgaacaagacaaaaacacccaagaagtttttgcacaagtcaaacaaatttacaaaacaccaccaattaaagattttggtggttttaattttt |
| | | cacaaatattaccagatccatcaaaaccaagcaagaggtcatttattgaagatctacttttcaacaaagtgacacttgcagatgctggcttcatcaaacaatatggtgattgcctt |
| | | ggtgatattgctgctagggacctcatttgtgcacaaaagtttaacggccttactgttttgccacctttgctcacagatgaaatgattgctcaatacacttctgcactgttagcgggtac |
| | | aatcacttctggttggacctttggtgcaggtgctgcattacaaataccatttgctatgcaaatggcttataggtttaatggtattggagttacacagaatgttctctatgagaaccaaa |
| | | aattgattgccaaccaatttaatagtgctattggcaaaattcaagactcactttcttccacagcaagtgcacttggaaaacttcaagatgtggtcaaccaaaatgcacaagcttta |
| | | aacacgcttgttaaacaacttagctccaattttggtgcaatttcaagtgttttaaatgatatcctttcacgtcttgaccctcccgaggctgaagtgcaaattgataggttgatcacagg |
| | | cagacttcaaagtttgcagacatatgtgactcaacaattaattagagctgcagaaatcagagcttctgctaatcttgctgctactaaaatgtcagagtgtgtacttggacaatcaa |
| | | aaagagttgatttttgtggaaagggctatcatcttatgtccttccctcagtcagcacctcatggtgtagtcttcttgcatgtgacttatgtccctgcacaagaaaagaacttcacaact |
| | | gctcctgccatttgtcatgatggaaaagcacactttcctcgtgaaggtgtctttgtttcaaatggcacacactggtttgtaacacaaaggaatttttatgaaccacaaatcattacta |
| | | cagacaacacatttgtgtctggtaactgtgatgttgtaataggaattgtcaacaacacagtttatgatcctttgcaacctgaattagactcattcaaggaggagttagataaatattt |
| | | taagaatcatacatcaccagatgttgatttaggtgacatctctggcattaatgcttcagttgtaaacattcaaaaagaaattgaccgcctcaatgaggttgccaagaatttaaatg |
| | | aatctctcatcgatctccaagaacttggaaagtatgagcagtatataaaatggccatggtacatttggctaggttttatagctggcttgattgccatagtaatggtgacaattatgctt |
| | | tgctgtatgaccagttgctgtagttgtctcaagggctgttgttcttgtggatcctgctgcaaatttgatgaagacgactctgagccagtgctcaaaggagtcaaattacattacaca |
| | | TAA |
| 16 | p5 | AGATTATCAAAAAGGATCTTCACCTAGATCCTTTTAAATTAAAAATGAAGTTTTAAATCAATCTAAAGTATATATGAGTAA |
| | | ACTTGGTCTGACAGTTATTAGAAAAATTCATCCAGCAGACGATAAAACGCAATACGCTGGCTATCCGGTGCCGCAATG |
| | | CCATACAGCACCAGAAAACGATCCGCCCATTCGCCGCCCAGTTCTTCCGCAATATCACGGGTGGCCAGCGCAATATC |
| | | CTGATAACGATCCGCCACGCCCAGACGGCCGCAATCAATAAAGCCGCTAAAACGGCCATTTTCCACCATAATGTTCG |
| | | GCAGGCACGCATCACCATGGGTCACCACCAGATCTTCGCCATCCGGCATGCTCGCTTTCAGACGCGCAAACAGCTCT |
| | | GCCGGTGCCAGGCCCTGATGTTCTTCATCCAGATCATCCTGATCCACCAGGCCCGCTTCCATACGGGTACGCGCACG |
| | | TTCAATACGATGTTTCGCCTGATGATCAAACGGACAGGTCGCCGGGTCCAGGGTATGCAGACGACGCATGGCATCCG |
| | | CCATAATGCTCACTTTTTCTGCCGGCGCCAGATGGCTAGACAGCAGATCCTGACCCGGCACTTCGCCCAGCAGCAGC |
| | | CAATCACGGCCCGCTTCGGTCACCACATCCAGCACCGCCGCACACGGAACACCGGTGGTGGCCAGCCAGCTCAGAC |
| | | GCGCCGCTTCATCCTGCAGCTCGTTCAGCGCACCGCTCAGATCGGTTTTCACAAACAGCACCGGACGACCCTGCGC |
| | | GCTCAGACGAAACACCGCCGCATCAGAGCAGCCAATGGTCTGCTGCGCCCAATCATAGCCAAACAGACGTTCCACCC |
| | | ACGCTGCCGGGCTACCCGCATGCAGGCCATCCTGTTCAATCATACTCTTCCTTTTTCAATATTATTGAAGCATTTATCA |
| | | GGGTTATTGTCTCATGAGCGGATACATATTTGAATGTATTTAGAAAAATAAACAAATAGGGGTTCCGCGCACATTTCCC |
| | | CGAAAAGTGCCACCTAAATTGTAAGCGTTAATATTTTGTTAAAATTCGCGTTAAATTTTTGTTAAATCAGCTCATTTTTTA |
| | | ACCAATAGGCCGAAATCGGCAAAATCCCTTATAAATCAAAAGAATAGACCGAGATAGGGTTGAGTGGCCGCTACAGG |
| | | GCGCTCCCATTCGCCATTCAGGCTGCGCAACTGTTGGGAAGGGCGTTTCGGTGCGGGCCTCTTCGCTATTACGCCA |
| | | GCTGGCGAAAGGGGGATGTGCTGCAAGGCGATTAAGTTGGGTAACGCCAGGGTTTTCCCAGTCACGACGTTGTAAAA |
| | | CGACGGCCAGTGAGCGCGACGTAATACGACTCACTATAGGGCGAATTGAAGGAAGGCCGTCAAGGCCGCATGGGAA |
| | | GCCCTCGACCGTCGATTGTCCACTGGTCAACAATAGATGACTTACAACTAATCGGAAGGTGCAGAGACTCGACGGGA |
| | | GCTACCCTAACGTCAAGACGAGGGTAAAGAGAGAGTCCAATTCTCAAAGCCAATAGGCAGTAGCGAAAGCTGCAAGA |
| | | GAATGAAAATCCGTTGACCTTAAACGGTCGTGTGGGTTCAAGTCCCTCCACCCCCACGCCGGAAACGCAATAGCCGA |
| | | AAAACAAAAAACAAAAAAAACAAAAAAAAAACCAAAAAAACAAAACACAacgttactggccgaagccgcttggaataaggccggtgtgcgttt |
| | | gtctatatgttattttccaccatattgccgtcttttggcaatgtgagggcccggaaacctggccctgtcttcttgacgagcattcctaggggtctttcccctctcgccaaaggaatgca |
| | | aggtctgttgaatgtcgtgaaggaagcagttcctctggaagcttcttgaagacaaacaacgtctgtagcgaccctttgcaggcagcggaaccccccacctggcgacaggtgc |
| | | ctctgcggccaaaagccacgtgtataagatacacctgcaaaggcggcacaaccccagtgccacgttgtgagttggatagttgtggaaagagtcaaatggctctcctcaagc |
| | | gtattcaacaaggggctgaaggatgcccagaaggtaccccattgtatgggatctgatctggggcctcggtgcacatgctttacatgtgtttagtcgaggttaaaaaacgtctag |
| | | gccccccgaaccacggggacgtggttttcctttgaaaaacacgatgataataGCCACCatgtttgtttttcttgttttattgccactagtctctagtcagtgtgttaatcttacaacc |
| | | agaactcaattaccccctgcatacactaattctttcacacgtggtgtttattaccctgacaaagttttcagatcctcagttttacattcaactcaggacttgttcttacctttcttttccaa |
| | | tgttacttggttccatgctatacatgtctctgggaccaatggtactaagaggtttgataaccctgtcctaccatttaatgatggtgtttattttgcttccactgagaagtctaacataataa |
| | | gaggctggatttttggtactactttagattcgaagacccagtccctacttattgttaataacgctactaatgttgttattaaagtctgtgaatttcaattttgtaatgatccatttttgggt |
| | | gtttattaccacaaaaacaacaaaagttggatggaaagtgagttcagagtttattctagtgcgaataattgcacttttgaatatgtctctcagccttttcttatggaccttgaaggaaaac |
| | | agggtaatttcaaaaatcttagggaatttgtgtttaagaatattgatggttattttaaaatatattctaagcacacgcctattaatttagtgcgtgatctccctcagggtttttcggcttta |
| | | gaaccattggtagatttgccaataggtattaacatcactaggtttcaaactttacttgctttacatagaagttatttgactcctggtgattcttcttcaggttggacagctggtgctgcagc |
| | | ttattatgtgggttatcttcaacctaggacttttctattaaaatataatgaaaatggaaccattacagatgctgtagactgtgcacttgaccctctctcagaaacaaagtgtacgttga |
| | | aatccttcactgtagaaaaaggaatctatcaaacttctaactttagagtccaaccaacagaatctattgttagatttcctaatattacaaacttgtgcccttttggtgaagtttttaacg |
| | | ccaccagatttgcatctgtttatgcttggaacaggaagagaatcagcaactgtgttgctgattattctgtcctatataattccgcatcattttccacttttaagtgttatggagtgtctcct |
| | | actaaattaaatgatctctgctttactaatgtctatgcagattcatttgtaattagaggtgatgaagtcagacaaatcgctccagggcaaactggaaagattgctgattataattata |
| | | aattaccagatgattttacaggctgcgttatagcttggaattctaacaatcttgattctaaggttggtggtaattataattacctgtatagattgtttaggaagtctaatctcaaacctttt |
| | | gagagagatatttcaactgaaatctatcaggccggtagcacaccttgtaatggtgttgaaggttttaattgttactttcctttacaatcatatggtttccaacccactaatggtgttggtt |
| | | accaaccatacagagtagtagtactttcttttgaacttctacatgcaccagcaactgtttgtggacctaaaaagtctactaatttggttaaaaacaaatgtgtcaatttcaacttcaat |
| | | ggtttaacaggcacaggtgttcttactgagtctaacaaaaagtttctgcctttccaacaatttggcagagacattgctgacactactgatgctgtccgtgatccacagacacttga |
| | | gattcttgacattacaccatgttcttttggtggtgtcagtgttataacaccaggaacaaatacttctaaccaggttgctgttctttatcaggatgttaactgcacagaagtccctgttgct |
| | | attcatgcagatcaacttactcctacttggcgtgtttattctacaggttctaatgtttttcaaacacgtgcaggctgtttaataggggctgaacatgtcaacaactcatatgagtgtgac |
| | | atacccattggtgcaggtatatgcgctagttatcagactcagactaattctcctggcagcgccagcagtgtagctagtcaatccatcattgcctacactatgtcacttggtgcaga |
| | | aaattcagttgcttactctaataactctattgccatacccacaaattttactattagtgttaccacagaaattctaccagtgtctatgaccaagacatcagtagattgtacaatgtaca |
| | | tttgtggtgattcaactgaatgcagcaatcttttgttgcaatatggcagtttttgtacacaattaaaccgtgctttaactggaatagctgttgaacaagacaaaaacacccaagaag |
| | | tttttgcacaagtcaaacaaatttacaaaacaccaccaattaaagattttggtggttttaatttttcacaaatattaccagatccatcaaaaccaagcaagaggtcatttattgaag |
| | | atctacttttcaacaaagtgacacttgcagatgctggcttcatcaaacaatatggtgattgccttggtgatattgctgctagggacctcatttgtgcacaaaagtttaacggccttact |
| | | gttttgccacctttgctcacagatgaaatgattgctcaatacacttctgcactgttagcgggtacaatcacttctggttggacctttggtgcaggtgctgcattacaaataccatttgct |
| | | atgcaaatggcttataggtttaatggtattggagttacacagaatgttctctatgagaaccaaaaattgattgccaaccaatttaatagtgctattggcaaaattcaagactcacttt |
| | | cttccacagcaagtgcacttggaaaacttcaagatgtggtcaaccaaaatgcacaagctttaaacacgcttgttaaacaacttagctccaattttggtgcaatttcaagtgttttaa |
| | | atgatatcctttcacgtcttgaccctcccgaggctgaagtgcaaattgataggttgatcacaggcagacttcaaagtttgcagacatatgtgactcaacaattaattagagctgca |
| | | gaaatcagagcttctgctaatcttgctgctactaaaatgtcagagtgtgtacttggacaatcaaaaagagttgatttttgtggaaagggctatcatcttatgtccttccctcagtcag |
| | | cacctcatggtgtagtcttcttgcatgtgacttatgtccctgcacaagaaaagaacttcacaactgctcctgccatttgtcatgatggaaaagcacactttcctcgtgaaggtgtcttt |
| | | gtttcaaatggcacacactggtttgtaacacaaaggaatttttatgaaccacaaatcattactacagacaacacatttgtgtctggtaactgtgatgttgtaataggaattgtcaac |
| | | aacacagtttatgatcctttgcaacctgaattagactcattcaaggaggagttagataaatattttaagaatcatacatcaccagatgttgatttaggtgacatctctggcattaatg |
| | | cttcagttgtaaacattcaaaaagaaattgaccgcctcaatgaggttgccaagaatttaaatgaatctctcatcgatctccaagaacttggaaagtatgagcagtatataaaatg |
| | | gccatggtacatttggctaggttttatagctggcttgattgccatagtaatggtgacaattatgctttgctgtTAAAAAAAACAAAAAACAAAACGGCTATTATG |
| | | CGTTACCGGCGAGACGCTACGGACTTAAATAATTGAGCCTTAAAGAAGAAATTCTTTAAGTGGATGCTCTCAAACTCA |
| | | GGGAAACCTAAATCTAGTTATAGACAAGGCAATCCTGAGCCAAGCCGAAGTAGTAATTAGTAAGACCAGTGGACAATC |
| | | GACGGATAACAGCATATCTAGCTGGGCCTCATGGGCCTTCCTTTCACTGCCCGCTTTCCAGTCGGGAAACCTGTCGT |
| | | GCCAGCTGCATTAACATGGTCATAGCTGTTTCCTTGCGTATTGGGCGCTCTCCGCTTCCTCGCTCACTGACTCGCTGC |
| | | GCTCGGTCGTTCGGGTAAAGCCTGGGGTGCCTAATGAGCAAAAGGCCAGCAAAAGGCCAGGAACCGTAAAAAGGCC |
| | | GCGTTGCTGGCGTTTTTCCATAGGCTCCGCCCCCCTGACGAGCATCACAAAAATCGACGCTCAAGTCAGAGGTGGCG |
| | | AAACCCGACAGGACTATAAAGATACCAGGCGTTTCCCCCTGGAAGCTCCCTCGTGCGCTCTCCTGTTCCGACCCTGC |
| | | CGCTTACCGGATACCTGTCCGCCTTTCTCCCTTCGGGAAGCGTGGCGCTTTCTCATAGCTCACGCTGTAGGTATCTCA |
| | | GTTCGGTGTAGGTCGTTCGCTCCAAGCTGGGCTGTGTGCACGAACCCCCCGTTCAGCCCGACCGCTGCGCCTTATC |
| | | CGGTAACTATCGTCTTGAGTCCAACCCGGTAAGACACGACTTATCGCCACTGGCAGCAGCCACTGGTAACAGGATTA |
| | | GCAGAGCGAGGTATGTAGGCGGTGCTACAGAGTTCTTGAAGTGGTGGCCTAACTACGGCTACACTAGAAGAACAGTA |
| | | TTTGGTATCTGCGCTCTGCTGAAGCCAGTTACCTTCGGAAAAAGAGTTGGTAGCTCTTGATCCGGCAAACAAACCACC |
| | | GCTGGTAGCGGTGGTTTTTTTGTTTGCAAGCAGCAGATTACGCGCAGAAAAAAAGGATCTCAAGAAGATCCTTTGATC |
| | | TTTTCTACGGGGTCTGACGCTCAGTGGAACGAAAACTCACGTTAAGGGATTTTGGTCATG |
| 17 | ORF5 | atgtttgtttttcttgttttattgccactagtctctagtcagtgtgttaatcttacaaccagaactcaattaccccctgcatacactaattctttcacacgtggtgtttattaccctgacaa |
| | | agttttcagatcctcagttttacattcaactcaggacttgttcttacctttcttttccaatgttacttggttccatgctatacatgtctctgggaccaatggtactaagaggtttgataacc |
| | | ctgtcctaccatttaatgatggtgtttattttgcttccactgagaagtctaacataataagaggctggatttttggtactactttagattcgaagacccagtccctacttattgttaataac |
| | | gctactaatgttgttattaaagtctgtgaatttcaattttgtaatgatccatttttgggtgtttattaccacaaaaacaacaaaagttggatggaaagtgagttcagagtttattctagtgc |
| | | gaataattgcacttttgaatatgtctctcagccttttcttatggaccttgaaggaaaacagggtaatttcaaaaatcttagggaatttgtgtttaagaatattgatggttattttaaaatat |
| | | attctaagcacacgcctattaatttagtgcgtgatctccctcagggtttttcggctttagaaccattggtagatttgccaataggtattaacatcactaggtttcaaactttacttgcttta |
| | | catagaagttatttgactcctggtgattcttcttcaggttggacagctggtgctgcagcttattatgtgggttatcttcaacctaggacttttctattaaaatataatgaaaatggaaccat |
| | | tacagatgctgtagactgtgcacttgaccctctctcagaaacaaagtgtacgttgaaatccttcactgtagaaaaaggaatctatcaaacttctaactttagagtccaaccaacaga |
| | | atctattgttagatttcctaatattacaaacttgtgcccttttggtgaagtttttaacgccaccagatttgcatctgtttatgcttggaacaggaagagaatcagcaactgtgttgctgatt |
| | | attctgtcctatataattccgcatcattttccacttttaagtgttatggagtgtctcctactaaattaaatgatctctgctttactaatgtctatgcagattcatttgtaattagaggtgat |
| | | gaagtcagacaaatcgctccagggcaaactggaaagattgctgattataattataaattaccagatgattttacaggctgcgttatagcttggaattctaacaatcttgattctaaggttg |
| | | gtggtaattataattacctgtatagattgtttaggaagtctaatctcaaaccttttgagagagatatttcaactgaaatctatcaggccggtagcacaccttgtaatggtgttgaaggt |
| | | tttaattgttactttcctttacaatcatatggtttccaacccactaatggtgttggttaccaaccatacagagtagtagtactttcttttgaacttctacatgcaccagcaactgtttgtgg |
| | | acctaaaaagtctactaatttggttaaaaacaaatgtgtcaatttcaacttcaatggtttaacaggcacaggtgttcttactgagtctaacaaaaagtttctgcctttccaacaatttgg |
| | | cagagacattgctgacactactgatgctgtccgtgatccacagacacttgagattcttgacattacaccatgttcttttggtggtgtcagtgttataacaccaggaacaaatacttct |
| | | aaccaggttgctgttctttatcaggatgttaactgcacagaagtccctgttgctattcatgcagatcaacttactcctacttggcgtgtttattctacaggttctaatgtttttcaaacacg |
| | | tgcaggctgtttaataggggctgaacatgtcaacaactcatatgagtgtgacatacccattggtgcaggtatatgcgctagttatcagactcagactaattctcctggcagcgcc |
| | | agcagtgtagctagtcaatccatcattgcctacactatgtcacttggtgcagaaaattcagttgcttactctaataactctattgccatacccacaaattttactattagtgttaccaca |
| | | gaaattctaccagtgtctatgaccaagacatcagtagattgtacaatgtacatttgtggtgattcaactgaatgcagcaatcttttgttgcaatatggcagtttttgtacacaattaaa |
| | | ccgtgctttaactggaatagctgttgaacaagacaaaaacacccaagaagtttttgcacaagtcaaacaaatttacaaaacaccaccaattaaagattttggtggttttaattttt |
| | | cacaaatattaccagatccatcaaaaccaagcaagaggtcatttattgaagatctacttttcaacaaagtgacacttgcagatgctggcttcatcaaacaatatggtgattgcctt |
| | | ggtgatattgctgctagggacctcatttgtgcacaaaagtttaacggccttactgttttgccacctttgctcacagatgaaatgattgctcaatacacttctgcactgttagcgggtac |
| | | aatcacttctggttggacctttggtgcaggtgctgcattacaaataccatttgctatgcaaatggcttataggtttaatggtattggagttacacagaatgttctctatgagaaccaaa |
| | | aattgattgccaaccaatttaatagtgctattggcaaaattcaagactcactttcttccacagcaagtgcacttggaaaacttcaagatgtggtcaaccaaaatgcacaagcttta |
| | | aacacgcttgttaaacaacttagctccaattttggtgcaatttcaagtgttttaaatgatatcctttcacgtcttgaccctcccgaggctgaagtgcaaattgataggttgatcacagg |
| | | cagacttcaaagtttgcagacatatgtgactcaacaattaattagagctgcagaaatcagagcttctgctaatcttgctgctactaaaatgtcagagtgtgtacttggacaatcaa |
| | | aaagagttgatttttgtggaaagggctatcatcttatgtccttccctcagtcagcacctcatggtgtagtcttcttgcatgtgacttatgtccctgcacaagaaaagaacttcacaact |
| | | gctcctgccatttgtcatgatggaaaagcacactttcctcgtgaaggtgtctttgtttcaaatggcacacactggtttgtaacacaaaggaatttttatgaaccacaaatcattacta |
| | | cagacaacacatttgtgtctggtaactgtgatgttgtaataggaattgtcaacaacacagtttatgatcctttgcaacctgaattagactcattcaaggaggagttagataaatattt |
| | | taagaatcatacatcaccagatgttgatttaggtgacatctctggcattaatgcttcagttgtaaacattcaaaaagaaattgaccgcctcaatgaggttgccaagaatttaaatg |
| | | aatctctcatcgatctccaagaacttggaaagtatgagcagtatataaaatggccatggtacatttggctaggttttatagctggcttgattgccatagtaatggtgacaattatgctt |
| | | tgctgtTAA |
| 18 | P7 | AGATTATCAAAAAGGATCTTCACCTAGATCCTTTTAAATTAAAAATGAAGTTTTAAATCAATCTAAAGTATATATGAGTAA |
| | | ACTTGGTCTGACAGTTATTAGAAAAATTCATCCAGCAGACGATAAAACGCAATACGCTGGCTATCCGGTGCCGCAATG |
| | | CCATACAGCACCAGAAAACGATCCGCCCATTCGCCGCCCAGTTCTTCCGCAATATCACGGGTGGCCAGCGCAATATC |
| | | CTGATAACGATCCGCCACGCCCAGACGGCCGCAATCAATAAAGCCGCTAAAACGGCCATTTTCCACCATAATGTTCG |
| | | GCAGGCACGCATCACCATGGGTCACCACCAGATCTTCGCCATCCGGCATGCTCGCTTTCAGACGCGCAAACAGCTCT |
| | | GCCGGTGCCAGGCCCTGATGTTCTTCATCCAGATCATCCTGATCCACCAGGCCCGCTTCCATACGGGTACGCGCACG |
| | | TTCAATACGATGTTTCGCCTGATGATCAAACGGACAGGTCGCCGGGTCCAGGGTATGCAGACGACGCATGGCATCCG |
| | | CCATAATGCTCACTTTTTCTGCCGGCGCCAGATGGCTAGACAGCAGATCCTGACCCGGCACTTCGCCCAGCAGCAGC |
| | | CAATCACGGCCCGCTTCGGTCACCACATCCAGCACCGCCGCACACGGAACACCGGTGGTGGCCAGCCAGCTCAGAC |
| | | GCGCCGCTTCATCCTGCAGCTCGTTCAGCGCACCGCTCAGATCGGTTTTCACAAACAGCACCGGACGACCCTGCGC |
| | | GCTCAGACGAAACACCGCCGCATCAGAGCAGCCAATGGTCTGCTGCGCCCAATCATAGCCAAACAGACGTTCCACCC |
| | | ACGCTGCCGGGCTACCCGCATGCAGGCCATCCTGTTCAATCATACTCTTCCTTTTTCAATATTATTGAAGCATTTATCA |
| | | GGGTTATTGTCTCATGAGCGGATACATATTTGAATGTATTTAGAAAAATAAACAAATAGGGGTTCCGCGCACATTTCCC |
| | | CGAAAAGTGCCACCTAAATTGTAAGCGTTAATATTTTGTTAAAATTCGCGTTAAATTTTTGTTAAATCAGCTCATTTTTTA |
| | | ACCAATAGGCCGAAATCGGCAAAATCCCTTATAAATCAAAAGAATAGACCGAGATAGGGTTGAGTGGCCGCTACAGG |
| | | GCGCTCCCATTCGCCATTCAGGCTGCGCAACTGTTGGGAAGGGCGTTTCGGTGCGGGCCTCTTCGCTATTACGCCA |
| | | GCTGGCGAAAGGGGGATGTGCTGCAAGGCGATTAAGTTGGGTAACGCCAGGGTTTTCCCAGTCACGACGTTGTAAAA |
| | | CGACGGCCAGTGAGCGCGACGTAATACGACTCACTATAGGGCGAATTGAAGGAAGGCCGTCAAGGCCGCATGGGAA |
| | | GCCCTCGACCGTCGATTGTCCACTGGTCAACAATAGATGACTTACAACTAATCGGAAGGTGCAGAGACTCGACGGGA |
| | | GCTACCCTAACGTCAAGACGAGGGTAAAGAGAGAGTCCAATTCTCAAAGCCAATAGGCAGTAGCGAAAGCTGCAAGA |
| | | GAATGAAAATCCGTTGACCTTAAACGGTCGTGTGGGTTCAAGTCCCTCCACCCCCACGCCGGAAACGCAATAGCCGA |
| | | AAAACAAAAAACAAAAAAAACAAAAAAAAAACCAAAAAAACAAAACACAacgttactggccgaagccgcttggaataaggccggtgtgcgttt |
| | | gtctatatgttattttccaccatattgccgtcttttggcaatgtgagggcccggaaacctggccctgtcttcttgacgagcattcctaggggtctttcccctctcgccaaaggaatgca |
| | | aggtctgttgaatgtcgtgaaggaagcagttcctctggaagcttcttgaagacaaacaacgtctgtagcgaccctttgcaggcagcggaaccccccacctggcgacaggtgc |
| | | ctctgcggccaaaagccacgtgtataagatacacctgcaaaggcggcacaaccccagtgccacgttgtgagttggatagttgtggaaagagtcaaatggctctcctcaagc |
| | | gtattcaacaaggggctgaaggatgcccagaaggtaccccattgtatgggatctgatctggggcctcggtgcacatgctttacatgtgtttagtcgaggttaaaaaacgtctag |
| | | gccccccgaaccacggggacgtggttttcctttgaaaaacacgatgataataGCCACCatgtttgtttttcttgttttattgccactagtctctagtcagtgtgttaatcttacaacc |
| | | agaactcaattaccccctgcatacactaattctttcacacgtggtgtttattaccctgacaaagttttcagatcctcagttttacattcaactcaggatttgttcttacctttttttccaat |
| | | gttacttggttccatgctatacatgtctctgggaccaatggtactaagaggtttgataaccctgtcctaccatttaatgatggtgtttattttgcttccactgagaagtctaacataataag |
| | | aggctggatctttggtactactttagattcgaagacccagtccctacttattgttaataacgctactaatgttgttattaaagtctgtgaatttcaattttgtaatgatccatttttgggtg |
| | | tttattaccacaaaaacaacaaaagttggatggaaagtgagttcagagtttattctagtgcgaataattgcacttttgaatatgtctctcagccttttcttatggaccttgaaggaaaac |
| | | agggtaatttcaaaaatcttagggaatttgtgtttaagaatattgatggttattttaaaatatattctaagcacacgcctattaatttagtgcgtgatctccctcagggtttttcggcttta |
| | | gaaccattggtagatttgccaataggtattaacatcactaggtttcaaactttacttgctttacatagaagttatttgactcctggtgattcttcttcaggttggacagctggtgctgcagc |
| | | ttattatgtgggttatcttcaacctaggacttttctattaaaatataatgaaaatggaaccattacagatgctgtagactgtgcacttgaccctctctcagaaacaaagtgtacgttga |
| | | aatccttcactgtagaaaaaggaatctatcaaacttctaactttagagtccaaccaacagaatctattgttagatttcctaatattacaaacttgtgcccttttggtgaagtttttaacg |
| | | ccaccagatttgcatctgtttatgcttggaacaggaagagaatcagcaactgtgttgctgattattctgtcctatataattccgcatcattttccacttttaagtgttatggagtgtctcct |
| | | actaaattaaatgatctctgctttactaatgtctatgcagattcatttgtaattagaggtgatgaagtcagacaaatcgctccagggcaaactggaaagattgctgattataattata |
| | | aattaccagatgattttacaggctgcgttatagcttggaattctaacaatcttgattctaaggttggtggtaattataattacctgtatagattgtttaggaagtctaatctcaaacctttt |
| | | gagagagatatttcaactgaaatctatcaggccggtagcacaccttgtaatggtgttgaaggttttaattgttactttcctttacaatcatatggtttccaacccactaatggtgttggtt |
| | | accaaccatacagagtagtagtactttcttttgaacttctacatgcaccagcaactgtttgtggacctaaaaagtctactaatttggttaaaaacaaatgtgtcaatttcaacttcaat |
| | | ggtttaacaggcacaggtgttcttactgagtctaacaaaaagtttctgcctttccaacaatttggcagagacattgctgacactactgatgctgtccgtgatccacagacacttga |
| | | gattcttgacattacaccatgttcttttggtggtgtcagtgttataacaccaggaacaaatacttctaaccaggttgctgttctttatcaggatgttaactgcacagaagtccctgttgct |
| | | attcatgcagatcaacttactcctacttggcgtgtttattctacaggttctaatgtttttcaaacacgtgcaggctgtttaataggggctgaacatgtcaacaactcatatgagtgtgac |
| | | atacccattggtgcaggtatatgcgctagttatcagactcagactaattctcctggcagcgccagcagtgtagctagtcaatccatcattgcctacactatgtcacttggtgcaga |
| | | aaattcagttgcttactctaataactctattgccatacccacaaattttactattagtgttaccacagaaattctaccagtgtctatgaccaagacatcagtagattgtacaatgtaca |
| | | tttgtggtgattcaactgaatgcagcaatcttttgttgcaatatggcagtttttgtacacaattaaaccgtgctttaactgggatagctgttgaacaagacaaaaacacccaagaag |
| | | tttttgcacaagtcaaacaaatttacaaaacaccaccaattaaagattttggtggttttaatttttcacaaatattaccagatccatcaaaaccaagcaagaggtcatttattgaag |
| | | atctacttttcaacaaagtgacacttgcagatgctggcttcatcaaacaatatggtgattgccttggtgatattgctgctagggacctcatttgtgcacaaaagtttaacggccttact |
| | | gttttgccacctttgctcacagatgaaatgattgctcaatacacttctgcactgttagcgggtacaatcacttctggttggacctttggtgcaggtgctgcattacaaataccatttgct |
| | | atgcaaatggcttataggtttaatggtattggagttacacagaatgttctctatgagaaccaaaaattgattgccaaccaatttaatagtgccattggcaaaattcaagactcacttt |
| | | cttccacagcaagtgcacttggaaaacttcaagatgtggtcaaccaaaatgcacaagctttaaacacgcttgttaaacaacttagctccaattttggtgcaatttcaagtgttttaa |
| | | atgatatcctttcacgtcttgaccctcccgaggctgaagtgcaaattgataggttgatcacaggcagacttcaaagtttgcagacatatgtgactcaacaattaattagagctgca |
| | | gaaatcagagcttctgctaatcttgctgctactaaaatgtcagagtgtgtacttggacaatcaaaaagagttgatttttgtggaaagggctatcatcttatgtccttccctcagtcag |
| | | cacctcatggtgtagtcttcttgcatgtgacttatgtccctgcacaagaaaagaacttcacaactgctcctgccatttgtcatgatggaaaagcacactttcctcgtgaaggtgtcttt |
| | | gtttcaaatggcacacactggtttgtaacacaaaggaatttttatgaaccacaaatcattactacagacaacacatttgtgtctggtaactgtgatgttgtaataggaattgtcaac |
| | | aacacagtttatgatcctttgcaacctgaattagactcattcaaggaggagttagataaatattttaagaatcatacatcaccagatgttgatttaggtgacatctctggcattaatg |
| | | cttcagttgtaaacattcaaaaagaaattgaccgcctcaatgaggttgccaagaatttaaatgaatctctcatcgatctccaagaacttggaaagtatgagcagGGGTATA |
| | | TCCCTGAAGCCCCCAGGGACGGCCAGGCTTACGTCAGAAAGGATGGAGAGTGGGTGCTCTTGAGCACCTTCCTGTA |
| | | AAAAAAACAAAAAACAAAACGGCTATTATGCGTTACCGGCGAGACGCTACGGACTTAAATAATTGAGCCTTAAAGAAG |
| | | AAATTCTTTAAGTGGATGCTCTCAAACTCAGGGAAACCTAAATCTAGTTATAGACAAGGCAATCCTGAGCCAAGCCGA |
| | | AGTAGTAATTAGTAAGACCAGTGGACAATCGACGGATAACAGCATATCTAGCTGGGCCTCATGGGCCTTCCTTTCACT |
| | | GCCCGCTTTCCAGTCGGGAAACCTGTCGTGCCAGCTGCATTAACATGGTCATAGCTGTTTCCTTGCGTATTGGGCGC |
| | | TCTCCGCTTCCTCGCTCACTGACTCGCTGCGCTCGGTCGTTCGGGTAAAGCCTGGGGTGCCTAATGAGCAAAAGGCC |
| | | AGCAAAAGGCCAGGAACCGTAAAAAGGCCGCGTTGCTGGCGTTTTTCCATAGGCTCCGCCCCCCTGACGAGCATCAC |
| | | AAAAATCGACGCTCAAGTCAGAGGTGGCGAAACCCGACAGGACTATAAAGATACCAGGCGTTTCCCCCTGGAAGCTC |
| | | CCTCGTGCGCTCTCCTGTTCCGACCCTGCCGCTTACCGGATACCTGTCCGCCTTTCTCCCTTCGGGAAGCGTGGCGC |
| | | TTTCTCATAGCTCACGCTGTAGGTATCTCAGTTCGGTGTAGGTCGTTCGCTCCAAGCTGGGCTGTGTGCACGAACCC |
| | | CCCGTTCAGCCCGACCGCTGCGCCTTATCCGGTAACTATCGTCTTGAGTCCAACCCGGTAAGACACGACTTATCGCC |
| | | ACTGGCAGCAGCCACTGGTAACAGGATTAGCAGAGCGAGGTATGTAGGCGGTGCTACAGAGTTCTTGAAGTGGTGG |
| | | CCTAACTACGGCTACACTAGAAGAACAGTATTTGGTATCTGCGCTCTGCTGAAGCCAGTTACCTTCGGAAAAAGAGTT |
| | | GGTAGCTCTTGATCCGGCAAACAAACCACCGCTGGTAGCGGTGGTTTTTTTGTTTGCAAGCAGCAGATTACGCGCAG |
| | | AAAAAAAGGATCTCAAGAAGATCCTTTGATCTTTTCTACGGGGTCTGACGCTCAGTGGAACGAAAACTCACGTTAAGG |
| | | GATTTTGGTCATG |
| 19 | ORF7 | atgtttgtttttcttgttttattgccactagtctctagtcagtgtgttaatcttacaaccagaactcaattaccccctgcatacactaattctttcacacgtggtgtttattaccctgacaa |
| | | agttttcagatcctcagttttacattcaactcaggatttgttcttacctttcttttccaatgttacttggttccatgctatacatgtctctgggaccaatggtactaagaggtttgataacc |
| | | ctgtcctaccatttaatgatggtgtttattttgcttccactgagaagtctaacataataagaggctggatctttggtactactttagattcgaagacccagtccctacttattgttaataac |
| | | gctactaatgttgttattaaagtctgtgaatttcaattttgtaatgatccatttttgggtgtttattaccacaaaaacaacaaaagttggatggaaagtgagttcagagtttattctagtgc |
| | | gaataattgcacttttgaatatgtctctcagccttttcttatggaccttgaaggaaaacagggtaatttcaaaaatcttagggaatttgtgtttaagaatattgatggttattttaaaatat |
| | | attctaagcacacgcctattaatttagtgcgtgatctccctcagggtttttcggctttagaaccattggtagatttgccaataggtattaacatcactaggtttcaaactttacttgcttta |
| | | catagaagttatttgactcctggtgattcttcttcaggttggacagctggtgctgcagcttattatgtgggttatcttcaacctaggacttttctattaaaatataatgaaaatggaaccat |
| | | tacagatgctgtagactgtgcacttgaccctctctcagaaacaaagtgtacgttgaaatccttcactgtagaaaaaggaatctatcaaacttctaactttagagtccaaccaacaga |
| | | atctattgttagatttcctaatattacaaacttgtgcccttttggtgaagtttttaacgccaccagatttgcatctgtttatgcttggaacaggaagagaatcagcaactgtgttgctgatt |
| | | attctgtcctatataattccgcatcattttccacttttaagtgttatggagtgtctcctactaaattaaatgatctctgctttactaatgtctatgcagattcatttgtaattagaggtgat |
| | | gaagtcagacaaatcgctccagggcaaactggaaagattgctgattataattataaattaccagatgattttacaggctgcgttatagcttggaattctaacaatcttgattctaaggttg |
| | | gtggtaattataattacctgtatagattgtttaggaagtctaatctcaaaccttttgagagagatatttcaactgaaatctatcaggccggtagcacaccttgtaatggtgttgaaggt |
| | | tttaattgttactttcctttacaatcatatggtttccaacccactaatggtgttggttaccaaccatacagagtagtagtactttcttttgaacttctacatgcaccagcaactgtttgtgg |
| | | acctaaaaagtctactaatttggttaaaaacaaatgtgtcaatttcaacttcaatggtttaacaggcacaggtgttcttactgagtctaacaaaaagtttctgcctttccaacaatttgg |
| | | cagagacattgctgacactactgatgctgtccgtgatccacagacacttgagattcttgacattacaccatgttcttttggtggtgtcagtgttataacaccaggaacaaatacttct |
| | | aaccaggttgctgttctttatcaggatgttaactgcacagaagtccctgttgctattcatgcagatcaacttactcctacttggcgtgtttattctacaggttctaatgtttttcaaacacg |
| | | tgcaggctgtttaataggggctgaacatgtcaacaactcatatgagtgtgacatacccattggtgcaggtatatgcgctagttatcagactcagactaattctcctggcagcgcc |
| | | agcagtgtagctagtcaatccatcattgcctacactatgtcacttggtgcagaaaattcagttgcttactctaataactctattgccatacccacaaattttactattagtgttaccaca |
| | | gaaattctaccagtgtctatgaccaagacatcagtagattgtacaatgtacatttgtggtgattcaactgaatgcagcaatcttttgttgcaatatggcagtttttgtacacaattaaa |
| | | ccgtgctttaactgggatagctgttgaacaagacaaaaacacccaagaagtttttgcacaagtcaaacaaatttacaaaacaccaccaattaaagattttggtggttttaattttt |
| | | cacaaatattaccagatccatcaaaaccaagcaagaggtcatttattgaagatctacttttcaacaaagtgacacttgcagatgctggcttcatcaaacaatatggtgattgcctt |
| | | ggtgatattgctgctagggacctcatttgtgcacaaaagtttaacggccttactgttttgccacctttgctcacagatgaaatgattgctcaatacacttctgcactgttagcgggtac |
| | | aatcacttctggttggacctttggtgcaggtgctgcattacaaataccatttgctatgcaaatggcttataggtttaatggtattggagttacacagaatgttctctatgagaaccaaa |
| | | aattgattgccaaccaatttaatagtgccattggcaaaattcaagactcactttcttccacagcaagtgcacttggaaaacttcaagatgtggtcaaccaaaatgcacaagcttt |
| | | aaacacgcttgttaaacaacttagctccaattttggtgcaatttcaagtgttttaaatgatatcctttcacgtcttgaccctcccgaggctgaagtgcaaattgataggttgatcacag |
| | | gcagacttcaaagtttgcagacatatgtgactcaacaattaattagagctgcagaaatcagagcttctgctaatcttgctgctactaaaatgtcagagtgtgtacttggacaatca |
| | | aaaagagttgatttttgtggaaagggctatcatcttatgtccttccctcagtcagcacctcatggtgtagtcttcttgcatgtgacttatgtccctgcacaagaaaagaacttcacaa |
| | | ctgctcctgccatttgtcatgatggaaaagcacactttcctcgtgaaggtgtctttgtttcaaatggcacacactggtttgtaacacaaaggaatttttatgaaccacaaatcattact |
| | | acagacaacacatttgtgtctggtaactgtgatgttgtaataggaattgtcaacaacacagtttatgatcctttgcaacctgaattagactcattcaaggaggagttagataaatat |
| | | tttaagaatcatacatcaccagatgttgatttaggtgacatctctggcattaatgcttcagttgtaaacattcaaaaagaaattgaccgcctcaatgaggttgccaagaatttaaat |
| | | gaatctctcatcgatctccaagaacttggaaagtatgagcagGGGTATATCCCTGAAGCCCCCAGGGACGGCCAGGCTTACGTCAGAAAG |
| | | GATGGAGAGTGGGTGCTCTTGAGCACCTTCCTGTAA |
| 20 | P9 | AGATTATCAAAAAGGATCTTCACCTAGATCCTTTTAAATTAAAAATGAAGTTTTAAATCAATCTAAAGTATATATGAGTAA |
| | | ACTTGGTCTGACAGTTATTAGAAAAATTCATCCAGCAGACGATAAAACGCAATACGCTGGCTATCCGGTGCCGCAATG |
| | | CCATACAGCACCAGAAAACGATCCGCCCATTCGCCGCCCAGTTCTTCCGCAATATCACGGGTGGCCAGCGCAATATC |
| | | CTGATAACGATCCGCCACGCCCAGACGGCCGCAATCAATAAAGCCGCTAAAACGGCCATTTTCCACCATAATGTTCG |
| | | GCAGGCACGCATCACCATGGGTCACCACCAGATCTTCGCCATCCGGCATGCTCGCTTTCAGACGCGCAAACAGCTCT |
| | | GCCGGTGCCAGGCCCTGATGTTCTTCATCCAGATCATCCTGATCCACCAGGCCCGCTTCCATACGGGTACGCGCACG |
| | | TTCAATACGATGTTTCGCCTGATGATCAAACGGACAGGTCGCCGGGTCCAGGGTATGCAGACGACGCATGGCATCCG |
| | | CCATAATGCTCACTTTTTCTGCCGGCGCCAGATGGCTAGACAGCAGATCCTGACCCGGCACTTCGCCCAGCAGCAGC |
| | | CAATCACGGCCCGCTTCGGTCACCACATCCAGCACCGCCGCACACGGAACACCGGTGGTGGCCAGCCAGCTCAGAC |
| | | GCGCCGCTTCATCCTGCAGCTCGTTCAGCGCACCGCTCAGATCGGTTTTCACAAACAGCACCGGACGACCCTGCGC |
| | | GCTCAGACGAAACACCGCCGCATCAGAGCAGCCAATGGTCTGCTGCGCCCAATCATAGCCAAACAGACGTTCCACCC |
| | | ACGCTGCCGGGCTACCCGCATGCAGGCCATCCTGTTCAATCATACTCTTCCTTTTTCAATATTATTGAAGCATTTATCA |
| | | GGGTTATTGTCTCATGAGCGGATACATATTTGAATGTATTTAGAAAAATAAACAAATAGGGGTTCCGCGCACATTTCCC |
| | | CGAAAAGTGCCACCTAAATTGTAAGCGTTAATATTTTGTTAAAATTCGCGTTAAATTTTTGTTAAATCAGCTCATTTTTTA |
| | | ACCAATAGGCCGAAATCGGCAAAATCCCTTATAAATCAAAAGAATAGACCGAGATAGGGTTGAGTGGCCGCTACAGG |
| | | GCGCTCCCATTCGCCATTCAGGCTGCGCAACTGTTGGGAAGGGCGTTTCGGTGCGGGCCTCTTCGCTATTACGCCA |
| | | GCTGGCGAAAGGGGGATGTGCTGCAAGGCGATTAAGTTGGGTAACGCCAGGGTTTTCCCAGTCACGACGTTGTAAAA |
| | | CGACGGCCAGTGAGCGCGACGTAATACGACTCACTATAGGGCGAATTGAAGGAAGGCCGTCAAGGCCGCATGGGAA |
| | | GCCCTCGACCGTCGATTGTCCACTGGTCAACAATAGATGACTTACAACTAATCGGAAGGTGCAGAGACTCGACGGGA |
| | | GCTACCCTAACGTCAAGACGAGGGTAAAGAGAGAGTCCAATTCTCAAAGCCAATAGGCAGTAGCGAAAGCTGCAAGA |
| | | GAATGAAAATCCGTTGACCTTAAACGGTCGTGTGGGTTCAAGTCCCTCCACCCCCACGCCGGAAACGCAATAGCCGA |
| | | AAAACAAAAAACAAAAAAAACAAAAAAAAAACCAAAAAAACAAAACACAacgttactggccgaagccgcttggaataaggccggtgtgcgttt |
| | | gtctatatgttattttccaccatattgccgtcttttggcaatgtgagggcccggaaacctggccctgtcttcttgacgagcattcctaggggtctttcccctctcgccaaaggaatgca |
| | | aggtctgttgaatgtcgtgaaggaagcagttcctctggaagcttcttgaagacaaacaacgtctgtagcgaccctttgcaggcagcggaaccccccacctggcgacaggtgc |
| | | ctctgcggccaaaagccacgtgtataagatacacctgcaaaggcggcacaaccccagtgccacgttgtgagttggatagttgtggaaagagtcaaatggctctcctcaagc |
| | | gtattcaacaaggggctgaaggatgcccagaaggtaccccattgtatgggatctgatctggggcctcggtgcacatgctttacatgtgtttagtcgaggttaaaaaacgtctag |
| | | gccccccgaaccacggggacgtggttttcctttgaaaaacacgatgataataGCCACCatgtttgtttttcttgttttattgccactagtctctagtcagtgtgttaatcttacaacc |
| | | agaactcaattaccccctgcatacactaattctttcacacgtggtgtttattaccctgacaaagttttcagatcctcagttttacattcaactcaggatttgttcttacctttcttttccaa |
| | | tgttacttggttccatgctatacatgtctctgggaccaatggtactaagaggtttgataaccctgtcctaccatttaatgatggtgtttattttgcttccactgagaagtctaacataataa |
| | | gaggctggatctttggtactactttagattcgaagacccagtccctacttattgttaataacgctactaatgttgttattaaagtctgtgaatttcaattttgtaatgatccatttttgggt |
| | | gtttattaccacaaaaacaacaaaagttggatggaaagtgagttcagagtttattctagtgcgaataattgcacttttgaatatgtctctcagccttttcttatggaccttgaaggaaaac |
| | | agggtaatttcaaaaatcttagggaatttgtgtttaagaatattgatggttattttaaaatatattctaagcacacgcctattaatttagtgcgtgatctccctcagggtttttcggcttta |
| | | gaaccattggtagatttgccaataggtattaacatcactaggtttcaaactttacttgctttacatagaagttatttgactcctggtgattcttcttcaggttggacagctggtgctgcagc |
| | | ttattatgtgggttatcttcaacctaggacttttctattaaaatataatgaaaatggaaccattacagatgctgtagactgtgcacttgaccctctctcagaaacaaagtgtacgttga |
| | | aatccttcactgtagaaaaaggaatctatcaaacttctaactttagagtccaaccaacagaatctattgttagatttcctaatattacaaacttgtgcccttttggtgaagtttttaacg |
| | | ccaccagatttgcatctgtttatgcttggaacaggaagagaatcagcaactgtgttgctgattattctgtcctatataattccgcatcattttccacttttaagtgttatggagtgtctcct |
| | | actaaattaaatgatctctgctttactaatgtctatgcagattcatttgtaattagaggtgatgaagtcagacaaatcgctccagggcaaactggaaagattgctgattataattata |
| | | aattaccagatgattttacaggctgcgttatagcttggaattctaacaatcttgattctaaggttggtggtaattataattacctgtatagattgtttaggaagtctaatctcaaacctttt |
| | | gagagagatatttcaactgaaatctatcaggccggtagcacaccttgtaatggtgttgaaggttttaattgttactttcctttacaatcatatggtttccaacccactaatggtgttggtt |
| | | accaaccatacagagtagtagtactttcttttgaacttctacatgcaccagcaactgtttgtggacctaaaaagtctactaatttggttaaaaacaaatgtgtcaatttcaacttcaat |
| | | ggtttaacaggcacaggtgttcttactgagtctaacaaaaagtttctgcctttccaacaatttggcagagacattgctgacactactgatgctgtccgtgatccacagacacttga |
| | | gattcttgacattacaccatgttcttttggtggtgtcagtgttataacaccaggaacaaatacttctaaccaggttgctgttctttatcaggatgttaactgcacagaagtccctgttgct |
| | | attcatgcagatcaacttactcctacttggcgtgtttattctacaggttctaatgtttttcaaacacgtgcaggctgtttaataggggctgaacatgtcaacaactcatatgagtgtgac |
| | | atacccattggtgcaggtatatgcgctagttatcagactcagactaattctcctggcagcgccagcagtgtagctagtcaatccatcattgcctacactatgtcacttggtgcaga |
| | | aaattcagttgcttactctaataactctattgccatacccacaaattttactattagtgttaccacagaaattctaccagtgtctatgaccaagacatcagtagattgtacaatgtaca |
| | | tttgtggtgattcaactgaatgcagcaatcttttgttgcaatatggcagtttttgtacacaattaaaccgtgctttaactgggatagctgttgaacaagacaaaaacacccaagaag |
| | | tttttgcacaagtcaaacaaatttacaaaacaccaccaattaaagattttggtggttttaatttttcacaaatattaccagatccatcaaaaccaagcaagaggtcatttattgaag |
| | | atctacttttcaacaaagtgacacttgcagatgctggcttcatcaaacaatatggtgattgccttggtgatattgctgctagggacctcatttgtgcacaaaagtttaacggccttact |
| | | gttttgccacctttgctcacagatgaaatgattgctcaatacacttctgcactgttagcgggtacaatcacttctggttggacctttggtgcaggtgctgcattacaaataccatttgct |
| | | atgcaaatggcttataggtttaatggtattggagttacacagaatgttctctatgagaaccaaaaattgattgccaaccaatttaatagtgccattggcaaaattcaagactcacttt |
| | | cttccacagcaagtgcacttggaaaacttcaagatgtggtcaaccaaaatgcacaagctttaaacacgcttgttaaacaacttagctccaattttggtgcaatttcaagtgttttaa |
| | | atgatatcctttcacgtcttgaccctcccgaggctgaagtgcaaattgataggttgatcacaggcagacttcaaagtttgcagacatatgtgactcaacaattaattagagctgca |
| | | gaaatcagagcttctgctaatcttgctgctactaaaatgtcagagtgtgtacttggacaatcaaaaagagttgatttttgtggaaagggctatcatcttatgtccttccctcagtcag |
| | | cacctcatggtgtagtcttcttgcatgtgacttatgtccctgcacaagaaaagaacttcacaactgctcctgccatttgtcatgatggaaaagcacactttcctcgtgaaggtgtcttt |
| | | gtttcaaatggcacacactggtttgtaacacaaaggaatttttatgaaccacaaatcattactacagacaacacatttgtgtctggtaactgtgatgttgtaataggaattgtcaac |
| | | aacacagtttatgatcctttgcaacctgaattagactcattcaaggaggagttagataaatattttaagaatcatacatcaccagatgttgatttaggtgacatctctggcattaatg |
| | | cttcagttgtaaacattcaaaaagaaattgaccgcctcaatgaggttgccaagaatttaaatgaatctctcatcgatctccaagaacttggaaagtatgagcagtatataaaatg |
| | | gccatggtacatttggctaggttttatagctggcttgattgccatagtaatggtgacaattatgctttgctgtatgaccagttgctgtagttgtctcaagggctgttgttcttgtggatcctg |
| | | ctgcaaatttgatgaagacgactctgagccagtgctcaaaggagtcaaattacattacacaTAAAAAAAACAAAAAACAAAACGGCTATTATGCGTT |
| | | ACCGGCGAGACGCTACGGACTTAAATAATTGAGCCTTAAAGAAGAAATTCTTTAAGTGGATGCTCTCAAACTCAGGGA |
| | | AACCTAAATCTAGTTATAGACAAGGCAATCCTGAGCCAAGCCGAAGTAGTAATTAGTAAGACCAGTGGACAATCGACG |
| | | GATAACAGCATATCTAGCTGGGCCTCATGGGCCTTCCTTTCACTGCCCGCTTTCCAGTCGGGAAACCTGTCGTGCCA |
| | | GCTGCATTAACATGGTCATAGCTGTTTCCTTGCGTATTGGGCGCTCTCCGCTTCCTCGCTCACTGACTCGCTGCGCTC |
| | | GGTCGTTCGGGTAAAGCCTGGGGTGCCTAATGAGCAAAAGGCCAGCAAAAGGCCAGGAACCGTAAAAAGGCCGCGT |
| | | TGCTGGCGTTTTTCCATAGGCTCCGCCCCCCTGACGAGCATCACAAAAATCGACGCTCAAGTCAGAGGTGGCGAAAC |
| | | CCGACAGGACTATAAAGATACCAGGCGTTTCCCCCTGGAAGCTCCCTCGTGCGCTCTCCTGTTCCGACCCTGCCGCT |
| | | TACCGGATACCTGTCCGCCTTTCTCCCTTCGGGAAGCGTGGCGCTTTCTCATAGCTCACGCTGTAGGTATCTCAGTTC |
| | | GGTGTAGGTCGTTCGCTCCAAGCTGGGCTGTGTGCACGAACCCCCCGTTCAGCCCGACCGCTGCGCCTTATCCGGT |
| | | AACTATCGTCTTGAGTCCAACCCGGTAAGACACGACTTATCGCCACTGGCAGCAGCCACTGGTAACAGGATTAGCAG |
| | | AGCGAGGTATGTAGGCGGTGCTACAGAGTTCTTGAAGTGGTGGCCTAACTACGGCTACACTAGAAGAACAGTATTTG |
| | | GTATCTGCGCTCTGCTGAAGCCAGTTACCTTCGGAAAAAGAGTTGGTAGCTCTTGATCCGGCAAACAAACCACCGCT |
| | | GGTAGCGGTGGTTTTTTTGTTTGCAAGCAGCAGATTACGCGCAGAAAAAAAGGATCTCAAGAAGATCCTTTGATCTTTT |
| | | CTACGGGGTCTGACGCTCAGTGGAACGAAAACTCACGTTAAGGGATTTTGGTCATG |
| 21 | ORF9 | atgtttgtttttcttgttttattgccactagtctctagtcagtgtgttaatcttacaaccagaactcaattaccccctgcatacactaattctttcacacgtggtgtttattaccctgacaa |
| | | agttttcagatcctcagttttacattcaactcaggatttgttcttacctttcttttccaatgttacttggttccatgctatacatgtctctgggaccaatggtactaagaggtttgataacc |
| | | ctgtcctaccatttaatgatggtgtttattttgcttccactgagaagtctaacataataagaggctggatctttggtactactttagattcgaagacccagtccctacttattgttaataac |
| | | gctactaatgttgttattaaagtctgtgaatttcaattttgtaatgatccatttttgggtgtttattaccacaaaaacaacaaaagttggatggaaagtgagttcagagtttattctagtgc |
| | | gaataattgcacttttgaatatgtctctcagccttttcttatggaccttgaaggaaaacagggtaatttcaaaaatcttagggaatttgtgtttaagaatattgatggttattttaaaatat |
| | | attctaagcacacgcctattaatttagtgcgtgatctccctcagggtttttcggctttagaaccattggtagatttgccaataggtattaacatcactaggtttcaaactttacttgcttta |
| | | catagaagttatttgactcctggtgattcttcttcaggttggacagctggtgctgcagcttattatgtgggttatcttcaacctaggacttttctattaaaatataatgaaaatggaaccat |
| | | tacagatgctgtagactgtgcacttgaccctctctcagaaacaaagtgtacgttgaaatccttcactgtagaaaaaggaatctatcaaacttctaactttagagtccaaccaacaga |
| | | atctattgttagatttcctaatattacaaacttgtgcccttttggtgaagtttttaacgccaccagatttgcatctgtttatgcttggaacaggaagagaatcagcaactgtgttgctgatt |
| | | attctgtcctatataattccgcatcattttccacttttaagtgttatggagtgtctcctactaaattaaatgatctctgctttactaatgtctatgcagattcatttgtaattagaggtgat |
| | | gaagtcagacaaatcgctccagggcaaactggaaagattgctgattataattataaattaccagatgattttacaggctgcgttatagcttggaattctaacaatcttgattctaaggttg |
| | | gtggtaattataattacctgtatagattgtttaggaagtctaatctcaaaccttttgagagagatatttcaactgaaatctatcaggccggtagcacaccttgtaatggtgttgaaggt |
| | | tttaattgttactttcctttacaatcatatggtttccaacccactaatggtgttggttaccaaccatacagagtagtagtactttcttttgaacttctacatgcaccagcaactgtttgtgg |
| | | acctaaaaagtctactaatttggttaaaaacaaatgtgtcaatttcaacttcaatggtttaacaggcacaggtgttcttactgagtctaacaaaaagtttctgcctttccaacaatttgg |
| | | cagagacattgctgacactactgatgctgtccgtgatccacagacacttgagattcttgacattacaccatgttcttttggtggtgtcagtgttataacaccaggaacaaatacttct |
| | | aaccaggttgctgttctttatcaggatgttaactgcacagaagtccctgttgctattcatgcagatcaacttactcctacttggcgtgtttattctacaggttctaatgtttttcaaacacg |
| | | tgcaggctgtttaataggggctgaacatgtcaacaactcatatgagtgtgacatacccattggtgcaggtatatgcgctagttatcagactcagactaattctcctggcagcgcc |
| | | agcagtgtagctagtcaatccatcattgcctacactatgtcacttggtgcagaaaattcagttgcttactctaataactctattgccatacccacaaattttactattagtgttaccaca |
| | | gaaattctaccagtgtctatgaccaagacatcagtagattgtacaatgtacatttgtggtgattcaactgaatgcagcaatcttttgttgcaatatggcagtttttgtacacaattaaa |
| | | ccgtgctttaactgggatagctgttgaacaagacaaaaacacccaagaagtttttgcacaagtcaaacaaatttacaaaacaccaccaattaaagattttggtggttttaattttt |
| | | cacaaatattaccagatccatcaaaaccaagcaagaggtcatttattgaagatctacttttcaacaaagtgacacttgcagatgctggcttcatcaaacaatatggtgattgcctt |
| | | ggtgatattgctgctagggacctcatttgtgcacaaaagtttaacggccttactgttttgccacctttgctcacagatgaaatgattgctcaatacacttctgcactgttagcgggtac |
| | | aatcacttctggttggacctttggtgcaggtgctgcattacaaataccatttgctatgcaaatggcttataggtttaatggtattggagttacacagaatgttctctatgagaaccaaa |
| | | aattgattgccaaccaatttaatagtgccattggcaaaattcaagactcactttcttccacagcaagtgcacttggaaaacttcaagatgtggtcaaccaaaatgcacaagcttt |
| | | aaacacgcttgttaaacaacttagctccaattttggtgcaatttcaagtgttttaaatgatatcctttcacgtcttgaccctcccgaggctgaagtgcaaattgataggttgatcacag |
| | | gcagacttcaaagtttgcagacatatgtgactcaacaattaattagagctgcagaaatcagagcttctgctaatcttgctgctactaaaatgtcagagtgtgtacttggacaatca |
| | | aaaagagttgatttttgtggaaagggctatcatcttatgtccttccctcagtcagcacctcatggtgtagtcttcttgcatgtgacttatgtccctgcacaagaaaagaacttcacaa |
| | | ctgctcctgccatttgtcatgatggaaaagcacactttcctcgtgaaggtgtctttgtttcaaatggcacacactggtttgtaacacaaaggaatttttatgaaccacaaatcattact |
| | | acagacaacacatttgtgtctggtaactgtgatgttgtaataggaattgtcaacaacacagtttatgatcctttgcaacctgaattagactcattcaaggaggagttagataaatat |
| | | tttaagaatcatacatcaccagatgttgatttaggtgacatctctggcattaatgcttcagttgtaaacattcaaaaagaaattgaccgcctcaatgaggttgccaagaatttaaat |
| | | gaatctctcatcgatctccaagaacttggaaagtatgagcagtatataaaatggccatggtacatttggctaggttttatagctggcttgattgccatagtaatggtgacaattatgc |
| | | tttgctgtatgaccagttgctgtagttgtctcaagggctgttgttcttgtggatcctgctgcaaatttgatgaagacgactctgagccagtgctcaaaggagtcaaattacattacac |
| | | aTAA |
| 22 | P1 | AGATTATCAAAAAGGATCTTCACCTAGATCCTTTTAAATTAAAAATGAAGTTTTAAATCAATCTAAAGTATATATGAGTAA |
| | | ACTTGGTCTGACAGTTATTAGAAAAATTCATCCAGCAGACGATAAAACGCAATACGCTGGCTATCCGGTGCCGCAATG |
| | | CCATACAGCACCAGAAAACGATCCGCCCATTCGCCGCCCAGTTCTTCCGCAATATCACGGGTGGCCAGCGCAATATC |
| | | CTGATAACGATCCGCCACGCCCAGACGGCCGCAATCAATAAAGCCGCTAAAACGGCCATTTTCCACCATAATGTTCG |
| | | GCAGGCACGCATCACCATGGGTCACCACCAGATCTTCGCCATCCGGCATGCTCGCTTTCAGACGCGCAAACAGCTCT |
| | | GCCGGTGCCAGGCCCTGATGTTCTTCATCCAGATCATCCTGATCCACCAGGCCCGCTTCCATACGGGTACGCGCACG |
| | | TTCAATACGATGTTTCGCCTGATGATCAAACGGACAGGTCGCCGGGTCCAGGGTATGCAGACGACGCATGGCATCCG |
| | | CCATAATGCTCACTTTTTCTGCCGGCGCCAGATGGCTAGACAGCAGATCCTGACCCGGCACTTCGCCCAGCAGCAGC |
| | | CAATCACGGCCCGCTTCGGTCACCACATCCAGCACCGCCGCACACGGAACACCGGTGGTGGCCAGCCAGCTCAGAC |
| | | GCGCCGCTTCATCCTGCAGCTCGTTCAGCGCACCGCTCAGATCGGTTTTCACAAACAGCACCGGACGACCCTGCGC |
| | | GCTCAGACGAAACACCGCCGCATCAGAGCAGCCAATGGTCTGCTGCGCCCAATCATAGCCAAACAGACGTTCCACCC |
| | | ACGCTGCCGGGCTACCCGCATGCAGGCCATCCTGTTCAATCATACTCTTCCTTTTTCAATATTATTGAAGCATTTATCA |
| | | GGGTTATTGTCTCATGAGCGGATACATATTTGAATGTATTTAGAAAAATAAACAAATAGGGGTTCCGCGCACATTTCCC |
| | | CGAAAAGTGCCACCTAAATTGTAAGCGTTAATATTTTGTTAAAATTCGCGTTAAATTTTTGTTAAATCAGCTCATTTTTTA |
| | | ACCAATAGGCCGAAATCGGCAAAATCCCTTATAAATCAAAAGAATAGACCGAGATAGGGTTGAGTGGCCGCTACAGG |
| | | GCGCTCCCATTCGCCATTCAGGCTGCGCAACTGTTGGGAAGGGCGTTTCGGTGCGGGCCTCTTCGCTATTACGCCA |
| | | GCTGGCGAAAGGGGGATGTGCTGCAAGGCGATTAAGTTGGGTAACGCCAGGGTTTTCCCAGTCACGACGTTGTAAAA |
| | | CGACGGCCAGTGAGCGCGACGTAATACGACTCACTATAGGGCGAATTGAAGGAAGGCCGTCAAGGCCGCATGGGAA |
| | | GCCCTCGACCGTCGATTGTCCACTGGTCAACAATAGATGACTTACAACTAATCGGAAGGTGCAGAGACTCGACGGGA |
| | | GCTACCCTAACGTCAAGACGAGGGTAAAGAGAGAGTCCAATTCTCAAAGCCAATAGGCAGTAGCGAAAGCTGCAAGA |
| | | GAATGAAAATCCGTTGACCTTAAACGGTCGTGTGGGTTCAAGTCCCTCCACCCCCACGCCGGAAACGCAATAGCCGA |
| | | AAAACAAAAAACAAAAAAAACAAAAAAAAAACCAAAAAAACAAAACACAacgttactggccgaagccgcttggaataaggccggtgtgcgttt |
| | | gtctatatgttattttccaccatattgccgtcttttggcaatgtgagggcccggaaacctggccctgtcttcttgacgagcattcctaggggtctttcccctctcgccaaaggaatgca |
| | | aggtctgttgaatgtcgtgaaggaagcagttcctctggaagcttcttgaagacaaacaacgtctgtagcgaccctttgcaggcagcggaaccccccacctggcgacaggtgc |
| | | ctctgcggccaaaagccacgtgtataagatacacctgcaaaggcggcacaaccccagtgccacgttgtgagttggatagttgtggaaagagtcaaatggctctcctcaagc |
| | | gtattcaacaaggggctgaaggatgcccagaaggtaccccattgtatgggatctgatctggggcctcggtgcacatgctttacatgtgtttagtcgaggttaaaaaacgtctag |
| | | gccccccgaaccacggggacgtggttttcctttgaaaaacacgatgataataGCCACCatgtttgtttttcttgttttattgccactagtctctagtcagtgtgttaatcttacaacc |
| | | agaactcaattaccccctgcatacactaattctttcacacgtggtgtttattaccctgacaaagttttcagatcctcagttttacattcaactcaggatttgttcttacctttcttttccaa |
| | | tgttacttggttccatgctatacatgtctctgggaccaatggtactaagaggtttgataaccctgtcctaccatttaatgatggtgtttattttgcttccactgagaagtctaacataataa |
| | | gaggctggatctttggtactactttagattcgaagacccagtccctacttattgttaataacgctactaatgttgttattaaagtctgtgaatttcaattttgtaatgatccatttttgggt |
| | | gtttattaccacaaaaacaacaaaagttggatggaaagtgagttcagagtttattctagtgcgaataattgcacttttgaatatgtctctcagccttttcttatggaccttgaaggaaaac |
| | | agggtaatttcaaaaatcttagggaatttgtgtttaagaatattgatggttattttaaaatatattctaagcacacgcctattaatttagtgcgtgatctccctcagggtttttcggcttta |
| | | gaaccattggtagatttgccaataggtattaacatcactaggtttcaaactttacttgctttacatagaagttatttgactcctggtgattcttcttcaggttggacagctggtgctgcagc |
| | | ttattatgtgggttatcttcaacctaggacttttctattaaaatataatgaaaatggaaccattacagatgctgtagactgtgcacttgaccctctctcagaaacaaagtgtacgttga |
| | | aatccttcactgtagaaaaaggaatctatcaaacttctaactttagagtccaaccaacagaatctattgttagatttcctaatattacaaacttgtgcccttttggtgaagtttttaacg |
| | | ccaccagatttgcatctgtttatgcttggaacaggaagagaatcagcaactgtgttgctgattattctgtcctatataattccgcatcattttccacttttaagtgttatggagtgtctcct |
| | | actaaattaaatgatctctgctttactaatgtctatgcagattcatttgtaattagaggtgatgaagtcagacaaatcgctccagggcaaactggaaagattgctgattataattata |
| | | aattaccagatgattttacaggctgcgttatagcttggaattctaacaatcttgattctaaggttggtggtaattataattacctgtatagattgtttaggaagtctaatctcaaacctttt |
| | | gagagagatatttcaactgaaatctatcaggccggtagcacaccttgtaatggtgttgaaggttttaattgttactttcctttacaatcatatggtttccaacccactaatggtgttggtt |
| | | accaaccatacagagtagtagtactttcttttgaacttctacatgcaccagcaactgtttgtggacctaaaaagtctactaatttggttaaaaacaaatgtgtcaatttcaacttcaat |
| | | ggtttaacaggcacaggtgttcttactgagtctaacaaaaagtttctgcctttccaacaatttggcagagacattgctgacactactgatgctgtccgtgatccacagacacttga |
| | | gattcttgacattacaccatgttcttttggtggtgtcagtgttataacaccaggaacaaatacttctaaccaggttgctgttctttatcaggatgttaactgcacagaagtccctgttgct |
| | | attcatgcagatcaacttactcctacttggcgtgtttattctacaggttctaatgtttttcaaacacgtgcaggctgtttaataggggctgaacatgtcaacaactcatatgagtgtgac |
| | | atacccattggtgcaggtatatgcgctagttatcagactcagactaattctcctggcagcgccagcagtgtagctagtcaatccatcattgcctacactatgtcacttggtgcaga |
| | | aaattcagttgcttactctaataactctattgccatacccacaaattttactattagtgttaccacagaaattctaccagtgtctatgaccaagacatcagtagattgtacaatgtaca |
| | | tttgtggtgattcaactgaatgcagcaatcttttgttgcaatatggcagtttttgtacacaattaaaccgtgctttaactgggatagctgttgaacaagacaaaaacacccaagaag |
| | | tttttgcacaagtcaaacaaatttacaaaacaccaccaattaaagattttggtggttttaatttttcacaaatattaccagatccatcaaaaccaagcaagaggtcatttattgaag |
| | | atctacttttcaacaaagtgacacttgcagatgctggcttcatcaaacaatatggtgattgccttggtgatattgctgctagggacctcatttgtgcacaaaagtttaacggccttact |
| | | gttttgccacctttgctcacagatgaaatgattgctcaatacacttctgcactgttagcgggtacaatcacttctggttggacctttggtgcaggtgctgcattacaaataccatttgct |
| | | atgcaaatggcttataggtttaatggtattggagttacacagaatgttctctatgagaaccaaaaattgattgccaaccaatttaatagtgccattggcaaaattcaagactcacttt |
| | | cttccacagcaagtgcacttggaaaacttcaagatgtggtcaaccaaaatgcacaagctttaaacacgcttgttaaacaacttagctccaattttggtgcaatttcaagtgttttaa |
| | | atgatatcctttcacgtcttgaccctcccgaggctgaagtgcaaattgataggttgatcacaggcagacttcaaagtttgcagacatatgtgactcaacaattaattagagctgca |
| | | gaaatcagagcttctgctaatcttgctgctactaaaatgtcagagtgtgtacttggacaatcaaaaagagttgatttttgtggaaagggctatcatcttatgtccttccctcagtcag |
| | | cacctcatggtgtagtcttcttgcatgtgacttatgtccctgcacaagaaaagaacttcacaactgctcctgccatttgtcatgatggaaaagcacactttcctcgtgaaggtgtcttt |
| | | gtttcaaatggcacacactggtttgtaacacaaaggaatttttatgaaccacaaatcattactacagacaacacatttgtgtctggtaactgtgatgttgtaataggaattgtcaac |
| | | aacacagtttatgatcctttgcaacctgaattagactcattcaaggaggagttagataaatattttaagaatcatacatcaccagatgttgatttaggtgacatctctggcattaatg |
| | | cttcagttgtaaacattcaaaaagaaattgaccgcctcaatgaggttgccaagaatttaaatgaatctctcatcgatctccaagaacttggaaagtatgagcagtatataaaatg |
| | | gccatggtacatttggctaggttttatagctggcttgattgccatagtaatggtgacaattatgctttgctgtTAAAAAAAACAAAAAACAAAACGGCTATTATG |
| | | CGTTACCGGCGAGACGCTACGGACTTAAATAATTGAGCCTTAAAGAAGAAATTCTTTAAGTGGATGCTCTCAAACTCA |
| | | GGGAAACCTAAATCTAGTTATAGACAAGGCAATCCTGAGCCAAGCCGAAGTAGTAATTAGTAAGACCAGTGGACAATC |
| | | GACGGATAACAGCATATCTAGCTGGGCCTCATGGGCCTTCCTTTCACTGCCCGCTTTCCAGTCGGGAAACCTGTCGT |
| | | GCCAGCTGCATTAACATGGTCATAGCTGTTTCCTTGCGTATTGGGCGCTCTCCGCTTCCTCGCTCACTGACTCGCTGC |
| | | GCTCGGTCGTTCGGGTAAAGCCTGGGGTGCCTAATGAGCAAAAGGCCAGCAAAAGGCCAGGAACCGTAAAAAGGCC |
| | | GCGTTGCTGGCGTTTTTCCATAGGCTCCGCCCCCCTGACGAGCATCACAAAAATCGACGCTCAAGTCAGAGGTGGCG |
| | | AAACCCGACAGGACTATAAAGATACCAGGCGTTTCCCCCTGGAAGCTCCCTCGTGCGCTCTCCTGTTCCGACCCTGC |
| | | CGCTTACCGGATACCTGTCCGCCTTTCTCCCTTCGGGAAGCGTGGCGCTTTCTCATAGCTCACGCTGTAGGTATCTCA |
| | | GTTCGGTGTAGGTCGTTCGCTCCAAGCTGGGCTGTGTGCACGAACCCCCCGTTCAGCCCGACCGCTGCGCCTTATC |
| | | CGGTAACTATCGTCTTGAGTCCAACCCGGTAAGACACGACTTATCGCCACTGGCAGCAGCCACTGGTAACAGGATTA |
| | | GCAGAGCGAGGTATGTAGGCGGTGCTACAGAGTTCTTGAAGTGGTGGCCTAACTACGGCTACACTAGAAGAACAGTA |
| | | TTTGGTATCTGCGCTCTGCTGAAGCCAGTTACCTTCGGAAAAAGAGTTGGTAGCTCTTGATCCGGCAAACAAACCACC |
| | | GCTGGTAGCGGTGGTTTTTTTGTTTGCAAGCAGCAGATTACGCGCAGAAAAAAAGGATCTCAAGAAGATCCTTTGATC |
| | | TTTTCTACGGGGTCTGACGCTCAGTGGAACGAAAACTCACGTTAAGGGATTTTGGTCATG |
| 23 | ORF11 | atgtttgtttttcttgttttattgccactagtctctagtcagtgtgttaatcttacaaccagaactcaattaccccctgcatacactaattctttcacacgtggtgtttattaccctgacaa |
| | | agttttcagatcctcagttttacattcaactcaggatttgttcttacctttcttttccaatgttacttggttccatgctatacatgtctctgggaccaatggtactaagaggtttgataacc |
| | | ctgtcctaccatttaatgatggtgtttattttgcttccactgagaagtctaacataataagaggctggatctttggtactactttagattcgaagacccagtccctacttattgttaataac |
| | | gctactaatgttgttattaaagtctgtgaatttcaattttgtaatgatccatttttgggtgtttattaccacaaaaacaacaaaagttggatggaaagtgagttcagagtttattctagtgc |
| | | gaataattgcacttttgaatatgtctctcagccttttcttatggaccttgaaggaaaacagggtaatttcaaaaatcttagggaatttgtgtttaagaatattgatggttattttaaaatat |
| | | attctaagcacacgcctattaatttagtgcgtgatctccctcagggtttttcggctttagaaccattggtagatttgccaataggtattaacatcactaggtttcaaactttacttgcttta |
| | | catagaagttatttgactcctggtgattcttcttcaggttggacagctggtgctgcagcttattatgtgggttatcttcaacctaggacttttctattaaaatataatgaaaatggaaccat |
| | | tacagatgctgtagactgtgcacttgaccctctctcagaaacaaagtgtacgttgaaatccttcactgtagaaaaaggaatctatcaaacttctaactttagagtccaaccaacaga |
| | | atctattgttagatttcctaatattacaaacttgtgcccttttggtgaagtttttaacgccaccagatttgcatctgtttatgcttggaacaggaagagaatcagcaactgtgttgctgatt |
| | | attctgtcctatataattccgcatcattttccacttttaagtgttatggagtgtctcctactaaattaaatgatctctgctttactaatgtctatgcagattcatttgtaattagaggtgat |
| | | gaagtcagacaaatcgctccagggcaaactggaaagattgctgattataattataaattaccagatgattttacaggctgcgttatagcttggaattctaacaatcttgattctaaggttg |
| | | gtggtaattataattacctgtatagattgtttaggaagtctaatctcaaaccttttgagagagatatttcaactgaaatctatcaggccggtagcacaccttgtaatggtgttgaaggt |
| | | tttaattgttactttcctttacaatcatatggtttccaacccactaatggtgttggttaccaaccatacagagtagtagtactttcttttgaacttctacatgcaccagcaactgtttgtgg |
| | | acctaaaaagtctactaatttggttaaaaacaaatgtgtcaatttcaacttcaatggtttaacaggcacaggtgttcttactgagtctaacaaaaagtttctgcctttccaacaatttgg |
| | | cagagacattgctgacactactgatgctgtccgtgatccacagacacttgagattcttgacattacaccatgttcttttggtggtgtcagtgttataacaccaggaacaaatacttct |
| | | aaccaggttgctgttctttatcaggatgttaactgcacagaagtccctgttgctattcatgcagatcaacttactcctacttggcgtgtttattctacaggttctaatgtttttcaaacacg |
| | | tgcaggctgtttaataggggctgaacatgtcaacaactcatatgagtgtgacatacccattggtgcaggtatatgcgctagttatcagactcagactaattctcctggcagcgcc |
| | | agcagtgtagctagtcaatccatcattgcctacactatgtcacttggtgcagaaaattcagttgcttactctaataactctattgccatacccacaaattttactattagtgttaccaca |
| | | gaaattctaccagtgtctatgaccaagacatcagtagattgtacaatgtacatttgtggtgattcaactgaatgcagcaatcttttgttgcaatatggcagtttttgtacacaattaaa |
| | | ccgtgctttaactgggatagctgttgaacaagacaaaaacacccaagaagtttttgcacaagtcaaacaaatttacaaaacaccaccaattaaagattttggtggttttaattttt |
| | | cacaaatattaccagatccatcaaaaccaagcaagaggtcatttattgaagatctacttttcaacaaagtgacacttgcagatgctggcttcatcaaacaatatggtgattgcctt |
| | | ggtgatattgctgctagggacctcatttgtgcacaaaagtttaacggccttactgttttgccacctttgctcacagatgaaatgattgctcaatacacttctgcactgttagcgggtac |
| | | aatcacttctggttggacctttggtgcaggtgctgcattacaaataccatttgctatgcaaatggcttataggtttaatggtattggagttacacagaatgttctctatgagaaccaaa |
| | | aattgattgccaaccaatttaatagtgccattggcaaaattcaagactcactttcttccacagcaagtgcacttggaaaacttcaagatgtggtcaaccaaaatgcacaagcttt |
| | | aaacacgcttgttaaacaacttagctccaattttggtgcaatttcaagtgttttaaatgatatcctttcacgtcttgaccctcccgaggctgaagtgcaaattgataggttgatcacag |
| | | gcagacttcaaagtttgcagacatatgtgactcaacaattaattagagctgcagaaatcagagcttctgctaatcttgctgctactaaaatgtcagagtgtgtacttggacaatca |
| | | aaaagagttgatttttgtggaaagggctatcatcttatgtccttccctcagtcagcacctcatggtgtagtcttcttgcatgtgacttatgtccctgcacaagaaaagaacttcacaa |
| | | ctgctcctgccatttgtcatgatggaaaagcacactttcctcgtgaaggtgtctttgtttcaaatggcacacactggtttgtaacacaaaggaatttttatgaaccacaaatcattact |
| | | acagacaacacatttgtgtctggtaactgtgatgttgtaataggaattgtcaacaacacagtttatgatcctttgcaacctgaattagactcattcaaggaggagttagataaatat |
| | | tttaagaatcatacatcaccagatgttgatttaggtgacatctctggcattaatgcttcagttgtaaacattcaaaaagaaattgaccgcctcaatgaggttgccaagaatttaaat |
| | | gaatctctcatcgatctccaagaacttggaaagtatgagcagtatataaaatggccatggtacatttggctaggttttatagctggcttgattgccatagtaatggtgacaattatgc |
| | | tttgctgtTAA |
| 24 | P13 | AGATTATCAAAAAGGATCTTCACCTAGATCCTTTTAAATTAAAAATGAAGTTTTAAATCAATCTAAAGTATATATGAGTAA |
| | | ACTTGGTCTGACAGTTATTAGAAAAATTCATCCAGCAGACGATAAAACGCAATACGCTGGCTATCCGGTGCCGCAATG |
| | | CCATACAGCACCAGAAAACGATCCGCCCATTCGCCGCCCAGTTCTTCCGCAATATCACGGGTGGCCAGCGCAATATC |
| | | CTGATAACGATCCGCCACGCCCAGACGGCCGCAATCAATAAAGCCGCTAAAACGGCCATTTTCCACCATAATGTTCG |
| | | GCAGGCACGCATCACCATGGGTCACCACCAGATCTTCGCCATCCGGCATGCTCGCTTTCAGACGCGCAAACAGCTCT |
| | | GCCGGTGCCAGGCCCTGATGTTCTTCATCCAGATCATCCTGATCCACCAGGCCCGCTTCCATACGGGTACGCGCACG |
| | | TTCAATACGATGTTTCGCCTGATGATCAAACGGACAGGTCGCCGGGTCCAGGGTATGCAGACGACGCATGGCATCCG |
| | | CCATAATGCTCACTTTTTCTGCCGGCGCCAGATGGCTAGACAGCAGATCCTGACCCGGCACTTCGCCCAGCAGCAGC |
| | | CAATCACGGCCCGCTTCGGTCACCACATCCAGCACCGCCGCACACGGAACACCGGTGGTGGCCAGCCAGCTCAGAC |
| | | GCGCCGCTTCATCCTGCAGCTCGTTCAGCGCACCGCTCAGATCGGTTTTCACAAACAGCACCGGACGACCCTGCGC |
| | | GCTCAGACGAAACACCGCCGCATCAGAGCAGCCAATGGTCTGCTGCGCCCAATCATAGCCAAACAGACGTTCCACCC |
| | | ACGCTGCCGGGCTACCCGCATGCAGGCCATCCTGTTCAATCATACTCTTCCTTTTTCAATATTATTGAAGCATTTATCA |
| | | GGGTTATTGTCTCATGAGCGGATACATATTTGAATGTATTTAGAAAAATAAACAAATAGGGGTTCCGCGCACATTTCCC |
| | | CGAAAAGTGCCACCTAAATTGTAAGCGTTAATATTTTGTTAAAATTCGCGTTAAATTTTTGTTAAATCAGCTCATTTTTTA |
| | | ACCAATAGGCCGAAATCGGCAAAATCCCTTATAAATCAAAAGAATAGACCGAGATAGGGTTGAGTGGCCGCTACAGG |
| | | GCGCTCCCATTCGCCATTCAGGCTGCGCAACTGTTGGGAAGGGCGTTTCGGTGCGGGCCTCTTCGCTATTACGCCA |
| | | GCTGGCGAAAGGGGGATGTGCTGCAAGGCGATTAAGTTGGGTAACGCCAGGGTTTTCCCAGTCACGACGTTGTAAAA |
| | | CGACGGCCAGTGAGCGCGACGTAATACGACTCACTATAGGGCGAATTGAAGGAAGGCCGTCAAGGCCGCATGGGAA |
| | | GCCCTCGACCGTCGATTGTCCACTGGTCAACAATAGATGACTTACAACTAATCGGAAGGTGCAGAGACTCGACGGGA |
| | | GCTACCCTAACGTCAAGACGAGGGTAAAGAGAGAGTCCAATTCTCAAAGCCAATAGGCAGTAGCGAAAGCTGCAAGA |
| | | GAATGAAAATCCGTTGACCTTAAACGGTCGTGTGGGTTCAAGTCCCTCCACCCCCACGCCGGAAACGCAATAGCCGA |
| | | AAAACAAAAAACAAAAAAAACAAAAAAAAAACCAAAAAAACAAAACACAacgttactggccgaagccgcttggaataaggccggtgtgcgttt |
| | | gtctatatgttattttccaccatattgccgtcttttggcaatgtgagggcccggaaacctggccctgtcttcttgacgagcattcctaggggtctttcccctctcgccaaaggaatgca |
| | | aggtctgttgaatgtcgtgaaggaagcagttcctctggaagcttcttgaagacaaacaacgtctgtagcgaccctttgcaggcagcggaaccccccacctggcgacaggtgc |
| | | ctctgcggccaaaagccacgtgtataagatacacctgcaaaggcggcacaaccccagtgccacgttgtgagttggatagttgtggaaagagtcaaatggctctcctcaagc |
| | | gtattcaacaaggggctgaaggatgcccagaaggtaccccattgtatgggatctgatctggggcctcggtgcacatgctttacatgtgtttagtcgaggttaaaaaacgtctag |
| | | gccccccgaaccacggggacgtggttttcctttgaaaaacacgatgataataGCCACCatgtttgtttttcttgttttattgccactagtctctagtcagtgtagagtccaaccaa |
| | | cagaatctattgttagatttcctaatattacaaacttgtgcccttttggtgaagtttttaacgccaccagatttgcatctgtttatgcttggaacaggaagagaatcagcaactgtgttg |
| | | ctgattattctgtcctatataattccgcatcattttccacttttaagtgttatggagtgtctcctactaaattaaatgatctctgctttactaatgtctatgcagattcatttgtaattaga |
| | | ggtgatgaagtcagacaaatcgctccagggcaaactggaaagattgctgattataattataaattaccagatgattttacaggctgcgttatagcttggaattctaacaatcttgattcta |
| | | aggttggtggtaattataattacctgtatagattgtttaggaagtctaatctcaaaccttttgagagagatatttcaactgaaatctatcaggccggtagcacaccttgtaatggtgtt |
| | | gaaggttttaattgttactttcctttacaatcatatggtttccaacccactaatggtgttggttaccaaccatacagagtagtagtactttcttttgaacttctacatgcaccagcaactgt |
| | | ttgtggacctaaaaagtctactaatttggttaaaaacaaatgtgtcaatttcTAAAAAAAACAAAAAACAAAACGGCTATTATGCGTTACCGGCGA |
| | | GACGCTACGGACTTAAATAATTGAGCCTTAAAGAAGAAATTCTTTAAGTGGATGCTCTCAAACTCAGGGAAACCTAAAT |
| | | CTAGTTATAGACAAGGCAATCCTGAGCCAAGCCGAAGTAGTAATTAGTAAGACCAGTGGACAATCGACGGATAACAGC |
| | | ATATCTAGCTGGGCCTCATGGGCCTTCCTTTCACTGCCCGCTTTCCAGTCGGGAAACCTGTCGTGCCAGCTGCATTAA |
| | | CATGGTCATAGCTGTTTCCTTGCGTATTGGGCGCTCTCCGCTTCCTCGCTCACTGACTCGCTGCGCTCGGTCGTTCG |
| | | GGTAAAGCCTGGGGTGCCTAATGAGCAAAAGGCCAGCAAAAGGCCAGGAACCGTAAAAAGGCCGCGTTGCTGGCGT |
| | | TTTTCCATAGGCTCCGCCCCCCTGACGAGCATCACAAAAATCGACGCTCAAGTCAGAGGTGGCGAAACCCGACAGGA |
| | | CTATAAAGATACCAGGCGTTTCCCCCTGGAAGCTCCCTCGTGCGCTCTCCTGTTCCGACCCTGCCGCTTACCGGATA |
| | | CCTGTCCGCCTTTCTCCCTTCGGGAAGCGTGGCGCTTTCTCATAGCTCACGCTGTAGGTATCTCAGTTCGGTGTAGGT |
| | | CGTTCGCTCCAAGCTGGGCTGTGTGCACGAACCCCCCGTTCAGCCCGACCGCTGCGCCTTATCCGGTAACTATCGTC |
| | | TTGAGTCCAACCCGGTAAGACACGACTTATCGCCACTGGCAGCAGCCACTGGTAACAGGATTAGCAGAGCGAGGTAT |
| | | GTAGGCGGTGCTACAGAGTTCTTGAAGTGGTGGCCTAACTACGGCTACACTAGAAGAACAGTATTTGGTATCTGCGCT |
| | | CTGCTGAAGCCAGTTACCTTCGGAAAAAGAGTTGGTAGCTCTTGATCCGGCAAACAAACCACCGCTGGTAGCGGTGG |
| | | TTTTTTTGTTTGCAAGCAGCAGATTACGCGCAGAAAAAAAGGATCTCAAGAAGATCCTTTGATCTTTTCTACGGGGTCT |
| | | GACGCTCAGTGGAACGAAAACTCACGTTAAGGGATTTTGGTCATG |
| 25 | ORF13 | atgtttgtttttcttgttttattgccactagtctctagtcagtgtagagtccaaccaacagaatctattgttagatttcctaatattacaaacttgtgcccttttggtgaagtttttaacgc |
| | | caccagatttgcatctgtttatgcttggaacaggaagagaatcagcaactgtgttgctgattattctgtcctatataattccgcatcattttccacttttaagtgttatggagtgtctccta |
| | | ctaaattaaatgatctctgctttactaatgtctatgcagattcatttgtaattagaggtgatgaagtcagacaaatcgctccagggcaaactggaaagattgctgattataattataaatt |
| | | accagatgattttacaggctgcgttatagcttggaattctaacaatcttgattctaaggttggtggtaattataattacctgtatagattgtttaggaagtctaatctcaaaccttttgag |
| | | agagatatttcaactgaaatctatcaggccggtagcacaccttgtaatggtgttgaaggttttaattgttactttcctttacaatcatatggtttccaacccactaatggtgttggttacc |
| | | aaccatacagagtagtagtactttcttttgaacttctacatgcaccagcaactgtttgtggacctaaaaagtctactaatttggttaaaaacaaatgtgtcaatttcTAA |
| 26 | ORF33 | atgtttgtttttcttgttttattgccactagtctctagtcagtgtagagtccaaccaacagaatctattgttagatttcctaatattacaaacttgtgcccttttggtgaagtttttaacgc |
| | | caccagatttgcatccgtgtatgcttggaacaggaagagaatcagcaactgtgttgctgattattctgtcctatataattccgcatcattttccacttttaagtgttatggagtgtctccta |
| | | ctaaattaaatgatctctgctttactaatgtctatgcagattcatttgtaattagaggtgatgaagtcagacaaatcgctccagggcaaactggaaagattgctgattataattataaatt |
| | | accagatgattttacaggctgcgttatagcttggaattctaacaatcttgattctaaggttggtggtaattataattacctgtatagattgtttaggaagtctaatctcaaaccttttgag |
| | | agagatatttcaactgaaatctatcaggccggtagcacaccttgtaatggtgttgaaggttttaattgttactttcctttacaatcatatggtttccaacccactaatggtgttggttacc |
| | | aaccatacagagtagtagtactttcttttgaacttctacatgcaccagcaactgtttgtggacctaaaaagtctactaatttggttaaaaacaaatgtgtcaatttcTAA |
| 27 | ORF35 | atgtttgtttttcttgttttattgccactagtctctagtcagtgtgttaatcttacaaccagaactcaattaccccctgcatacactaattctttcacacgtggtgtttattaccctgacaa |
| | | agttttcagatcctcagttttacattcaactcaggacttgttcttacctttcttttccaatgttacttggttccatgctatacatgtctctgggaccaatggtactaagaggtttgataacc |
| | | ctgtcctaccatttaatgatggtgtttattttgcttccactgagaagtctaacataataagaggctggatttttggtactactttagattcgaagacccagtccctacttattgttaataac |
| | | gctactaatgttgttattaaagtctgtgaatttcaattttgtaatgatccatttttgggtgtttattaccacaaaaacaacaaaagttggatggaaagtgagttcagagtttattctagtgc |
| | | gaataattgcacttttgaatatgtctctcagccttttcttatggaccttgaaggaaaacagggtaatttcaaaaatcttagggaatttgtgtttaagaatattgatggttattttaaaatat |
| | | attctaagcacacgcctattaatttagtgcgtgatctccctcagggtttttcggctttagaaccattggtagatttgccaataggtattaacatcactaggtttcaaactttacttgcttta |
| | | catagaagttatttgactcctggtgattcttcttcaggttggacagctggtgctgcagcttattatgtgggttatcttcaacctaggacttttctattaaaatataatgaaaatggaaccat |
| | | tacagatgctgtagactgtgcacttgaccctctctcagaaacaaagtgtacgttgaaatccttcactgtagaaaaaggaatctatcaaacttctaactttagagtccaaccaacaga |
| | | atctattgttagatttcctaatattacaaacttgtgcccttttggtgaagtttttaacgccaccagatttgcatccgtgtatgcttggaacaggaagagaatcagcaactgtgttgctga |
| | | ttattctgtcctatataattccgcatcattttccacttttaagtgttatggagtgtctcctactaaattaaatgatctctgctttactaatgtctatgcagattcatttgtaattagaggtg |
| | | atgaagtcagacaaatcgctccagggcaaactggaaagattgctgattataattataaattaccagatgattttacaggctgcgttatagcttggaattctaacaatcttgattctaaggtt |
| | | ggtggtaattataattacctgtatagattgtttaggaagtctaatctcaaaccttttgagagagatatttcaactgaaatctatcaggccggtagcacaccttgtaatggtgttgaag |
| | | gttttaattgttactttcctttacaatcatatggtttccaacccactaatggtgttggttaccaaccatacagagtagtagtactttcttttgaacttctacatgcaccagcaactgtttgt |
| | | ggacctaaaaagtctactaatttggttaaaaacaaatgtgtcaatttcaacttcaatggtttaacaggcacaggtgttcttactgagtctaacaaaaagtttctgcctttccaacaattt |
| | | ggcagagacattgctgacactactgatgctgtccgtgatccacagacacttgagattcttgacattacaccatgttcttttggtggtgtcagtgttataacaccaggaacaaatact |
| | | tctaaccaggttgctgttctttatcaggatgttaactgcacagaagtccctgttgctattcatgcagatcaacttactcctacttggcgtgtttattctacaggttctaatgtttttcaaac |
| | | acgtgcaggctgtttaataggggctgaacatgtcaacaactcatatgagtgtgacatacccattggtgcaggtatatgcgctagttatcagactcagactaattctcctggcagcg |
| | | ccagcagtgtagctagtcaatccatcattgcctacactatgtcacttggtgcagaaaattcagttgcttactctaataactctattgccatacccacaaattttactattagtgttacca |
| | | cagaaattctaccagtgtctatgaccaagacatcagtagattgtacaatgtacatttgtggtgattcaactgaatgcagcaatcttttgttgcaatatggcagtttttgtacacaatta |
| | | aaccgtgctttaactggaatagctgttgaacaagacaaaaacacccaagaagtttttgcacaagtcaaacaaatttacaaaacaccaccaattaaagattttggtggttttaatt |
| | | tttcacaaatattaccagatccatcaaaaccaagcaagaggtcatttattgaagatctacttttcaacaaagtgacacttgcagatgctggcttcatcaaacaatatggtgattgc |
| | | cttggtgatattgctgctagggacctcatttgtgcacaaaagtttaacggccttactgttttgccacctttgctcacagatgaaatgattgctcaatacacttctgcactgttagcgggt |
| | | acaatcacttctggttggacctttggtgcaggtgctgcattacaaataccatttgctatgcaaatggcttataggtttaatggtattggagttacacagaatgttctctatgagaacca |
| | | aaaattgattgccaaccaatttaatagtgctattggcaaaattcaagactcactttcttccacagcaagtgcacttggaaaacttcaagatgtggtcaaccaaaatgcacaagct |
| | | ttaaacacgcttgttaaacaacttagctccaattttggtgcaatttcaagtgttttaaatgatatcctttcacgtcttgaccctcccgaggctgaagtgcaaattgataggttgatcaca |
| | | ggcagacttcaaagtttgcagacatatgtgactcaacaattaattagagctgcagaaatcagagcttctgctaatcttgctgctactaaaatgtcagagtgtgtacttggacaatc |
| | | aaaaagagttgatttttgtggaaagggctatcatcttatgtccttccctcagtcagcacctcatggtgtagtcttcttgcatgtgacttatgtccctgcacaagaaaagaacttcaca |
| | | actgctcctgccatttgtcatgatggaaaagcacactttcctcgtgaaggtgtctttgtttcaaatggcacacactggtttgtaacacaaaggaatttttatgaaccacaaatcatta |
| | | ctacagacaacacatttgtgtctggtaactgtgatgttgtaataggaattgtcaacaacacagtttatgatcctttgcaacctgaattagactcattcaaggaggagttagataaat |
| | | attttaagaatcatacatcaccagatgttgatttaggtgacatctctggcattaatgcttcagttgtaaacattcaaaaagaaattgaccgcctcaatgaggttgccaagaatttaa |
| | | atgaatctctcatcgatctccaagaacttggaaagtatgagcagtatataaaatggccatggtacatttggctaggttttatagctggcttgattgccatagtaatggtgacaattat |
| | | gctttgctgtatgaccagttgctgtagttgtctcaagggctgttgttcttgtggatcctgctgcaaatttgatgaagacgactctgagccagtgctcaaaggagtcaaattacattac |
| | | acaTAA |
| 28 | ORF36 | atgtttgtttttcttgttttattgccactagtctctagtcagtgtgttaatcttacaaccagaactcaattaccccctgcatacactaattctttcacacgtggtgtttattaccctgacaa |
| | | agttttcagatcctcagttttacattcaactcaggatttgttcttacctttcttttccaatgttacttggttccatgctatacatgtctctgggaccaatggtactaagaggtttgataacc |
| | | ctgtcctaccatttaatgatggtgtttattttgcttccactgagaagtctaacataataagaggctggatctttggtactactttagattcgaagacccagtccctacttattgttaataac |
| | | gctactaatgttgttattaaagtctgtgaatttcaattttgtaatgatccatttttgggtgtttattaccacaaaaacaacaaaagttggatggaaagtgagttcagagtttattctagtgc |
| | | gaataattgcacttttgaatatgtctctcagccttttcttatggaccttgaaggaaaacagggtaatttcaaaaatcttagggaatttgtgtttaagaatattgatggttattttaaaatat |
| | | attctaagcacacgcctattaatttagtgcgtgatctccctcagggtttttcggctttagaaccattggtagatttgccaataggtattaacatcactaggtttcaaactttacttgcttta |
| | | catagaagttatttgactcctggtgattcttcttcaggttggacagctggtgctgcagcttattatgtgggttatcttcaacctaggacttttctattaaaatataatgaaaatggaaccat |
| | | tacagatgctgtagactgtgcacttgaccctctctcagaaacaaagtgtacgttgaaatccttcactgtagaaaaaggaatctatcaaacttctaactttagagtccaaccaacaga |
| | | atctattgttagatttcctaatattacaaacttgtgcccttttggtgaagtttttaacgccaccagatttgcatccgtgtatgcttggaacaggaagagaatcagcaactgtgttgctga |
| | | ttattctgtcctatataattccgcatcattttccacttttaagtgttatggagtgtctcctactaaattaaatgatctctgctttactaatgtctatgcagattcatttgtaattagaggtg |
| | | atgaagtcagacaaatcgctccagggcaaactggaaagattgctgattataattataaattaccagatgattttacaggctgcgttatagcttggaattctaacaatcttgattctaaggtt |
| | | ggtggtaattataattacctgtatagattgtttaggaagtctaatctcaaaccttttgagagagatatttcaactgaaatctatcaggccggtagcacaccttgtaatggtgttgaag |
| | | gttttaattgttactttcctttacaatcatatggtttccaacccactaatggtgttggttaccaaccatacagagtagtagtactttcttttgaacttctacatgcaccagcaactgtttgt |
| | | ggacctaaaaagtctactaatttggttaaaaacaaatgtgtcaatttcaacttcaatggtttaacaggcacaggtgttcttactgagtctaacaaaaagtttctgcctttccaacaattt |
| | | ggcagagacattgctgacactactgatgctgtccgtgatccacagacacttgagattcttgacattacaccatgttcttttggtggtgtcagtgttataacaccaggaacaaatact |
| | | tctaaccaggttgctgttctttatcaggatgttaactgcacagaagtccctgttgctattcatgcagatcaacttactcctacttggcgtgtttattctacaggttctaatgtttttcaaac |
| | | acgtgcaggctgtttaataggggctgaacatgtcaacaactcatatgagtgtgacatacccattggtgcaggtatatgcgctagttatcagactcagactaattctcctggcagcg |
| | | ccagcagtgtagctagtcaatccatcattgcctacactatgtcacttggtgcagaaaattcagttgcttactctaataactctattgccatacccacaaattttactattagtgttacca |
| | | cagaaattctaccagtgtctatgaccaagacatcagtagattgtacaatgtacatttgtggtgattcaactgaatgcagcaatcttttgttgcaatatggcagtttttgtacacaatta |
| | | aaccgtgctttaactgggatagctgttgaacaagacaaaaacacccaagaagtttttgcacaagtcaaacaaatttacaaaacaccaccaattaaagattttggtggttttaatt |
| | | tttcacaaatattaccagatccatcaaaaccaagcaagaggtcatttattgaagatctacttttcaacaaagtgacacttgcagatgctggcttcatcaaacaatatggtgattgc |
| | | cttggtgatattgctgctagggacctcatttgtgcacaaaagtttaacggccttactgttttgccacctttgctcacagatgaaatgattgctcaatacacttctgcactgttagcgggt |
| | | acaatcacttctggttggacctttggtgcaggtgctgcattacaaataccatttgctatgcaaatggcttataggtttaatggtattggagttacacagaatgttctctatgagaacca |
| | | aaaattgattgccaaccaatttaatagtgccattggcaaaattcaagactcactttcttccacagcaagtgcacttggaaaacttcaagatgtggtcaaccaaaatgcacaagc |
| | | tttaaacacgcttgttaaacaacttagctccaattttggtgcaatttcaagtgttttaaatgatatcctttcacgtcttgaccctcccgaggctgaagtgcaaattgataggttgatcac |
| | | aggcagacttcaaagtttgcagacatatgtgactcaacaattaattagagctgcagaaatcagagcttctgctaatcttgctgctactaaaatgtcagagtgtgtacttggacaat |
| | | caaaaagagttgatttttgtggaaagggctatcatcttatgtccttccctcagtcagcacctcatggtgtagtcttcttgcatgtgacttatgtccctgcacaagaaaagaacttcac |
| | | aactgctcctgccatttgtcatgatggaaaagcacactttcctcgtgaaggtgtctttgtttcaaatggcacacactggtttgtaacacaaaggaatttttatgaaccacaaatcatt |
| | | actacagacaacacatttgtgtctggtaactgtgatgttgtaataggaattgtcaacaacacagtttatgatcctttgcaacctgaattagactcattcaaggaggagttagataaa |
| | | tattttaagaatcatacatcaccagatgttgatttaggtgacatctctggcattaatgcttcagttgtaaacattcaaaaagaaattgaccgcctcaatgaggttgccaagaatttaa |
| | | atgaatctctcatcgatctccaagaacttggaaagtatgagcagtatataaaatggccatggtacatttggctaggttttatagctggcttgattgccatagtaatggtgacaattat |
| | | gctttgctgtatgaccagttgctgtagttgtctcaagggctgttgttcttgtggatcctgctgcaaatttgatgaagacgactctgagccagtgctcaaaggagtcaaattacattac |
| | | acaTAA |
| 29 | ORF39 | ATGTTCGTTTTCCTTGTTTTACTGCCCCTCGTGTCTTCACAGTGTGTGAACCTCACCACTCGCACACAGCTACCTCCCG |
| | | CGTACACTAATTCATTTACCAGGGGCGTCTATTATCCTGATAAGGTGTTCCGGAGTTCAGTGTTGCATAGCACTCAAG |
| | | ACCTGTTCCTGCCCTTCTTCTCCAATGTCACTTGGTTTCATGCGATACATGTGTCTGGTACCAACGGAACGAAGAGATT |
| | | TGATAACCCCGTACTGCCATTCAATGATGGCGTATACTTTGCTTCGACTGAAAAATCCAACATCATCAGGGGCTGGAT |
| | | TTTTGGTACAACGCTTGATTCCAAGACCCAGTCCCTCCTTATTGTGAACAATGCGACCAACGTCGTGATAAAGGTCTG |
| | | TGAGTTTCAGTTCTGCAATGACCCATTCCTTGGAGTGTATTATCACAAGAACAACAAATCGTGGATGGAGTCAGAGTTT |
| | | AGGGTGTACAGCAGCGCTAACAACTGTACATTTGAGTATGTGAGTCAGCCGTTTCTGATGGATCTTGAGGGCAAACAG |
| | | GGCAATTTTAAGAATCTCAGAGAATTTGTGTTCAAGAACATTGATGGTTACTTTAAGATCTATAGCAAACATACGCCAAT |
| | | CAACTTGGTTCGTGATCTGCCACAGGGATTTAGCGCACTGGAACCTCTCGTTGACTTGCCCATAGGTATTAACATCAC |
| | | CAGGTTCCAGACGCTCTTGGCATTACACCGTAGTTATCTGACCCCCGGGGACTCCAGTTCCGGATGGACTGCAGGAG |
| | | CCGCTGCCTACTATGTGGGTTACCTCCAGCCCAGGACCTTTCTTTTGAAATATAACGAGAACGGCACAATCACTGATG |
| | | CTGTGGACTGCGCATTGGATCCTTTGTCAGAGACTAAGTGCACTCTGAAGTCATTCACAGTCGAGAAAGGCATTTACC |
| | | AGACGTCTAACTTCAGGGTTCAGCCTACTGAGTCCATCGTGAGATTCCCAAACATCACAAATCTTTGTCCCTTCGGTG |
| | | AGGTATTCAATGCGACACGATTTGCCTCAGTGTACGCGTGGAATCGGAAGAGGATCTCCAATTGCGTGGCCGACTAC |
| | | TCCGTCTTATACAACTCAGCTAGCTTTTCAACATTCAAGTGCTATGGCGTGAGCCCTACCAAGCTCAATGACCTGTGCT |
| | | TCACTAATGTGTATGCCGACTCTTTTGTCATTCGCGGCGACGAGGTCCGACAAATCGCACCGGGCCAAACCGGTAAA |
| | | ATTGCCGACTACAACTACAAGCTGCCTGACGACTTCACCGGCTGCGTAATCGCCTGGAACAGCAATAACCTGGATAG |
| | | CAAAGTGGGCGGAAACTACAACTACCTGTACCGGCTCTTTAGAAAGTCCAACCTGAAACCATTCGAGCGCGATATCTC |
| | | GACCGAAATCTACCAGGCGGGCAGCACCCCCTGTAATGGTGTAGAAGGGTTCAATTGTTACTTTCCACTCCAGAGTTA |
| | | TGGGTTCCAGCCGACCAATGGCGTCGGTTATCAACCATATCGCGTTGTGGTGTTGTCCTTTGAGCTGCTACACGCCC |
| | | CAGCTACAGTGTGCGGGCCAAAGAAAAGCACAAATCTTGTCAAGAACAAATGCGTTAACTTTAATTTTAATGGACTCAC |
| | | AGGTACAGGAGTCCTGACCGAATCTAATAAGAAGTTCCTGCCCTTTCAACAGTTCGGACGAGACATTGCCGACACCAC |
| | | CGATGCCGTTCGGGACCCACAGACCTTAGAAATTCTGGATATTACTCCATGTAGTTTTGGGGGAGTGTCTGTCATCAC |
| | | CCCTGGCACTAATACATCTAACCAGGTTGCAGTCCTCTACCAGGATGTGAACTGTACCGAAGTGCCGGTCGCTATTCA |
| | | CGCAGACCAGCTCACTCCTACCTGGCGGGTGTACTCCACAGGCTCTAACGTGTTTCAGACACGTGCAGGGTGCCTAA |
| | | TCGGCGCAGAGCATGTAAATAACTCCTATGAGTGTGATATCCCCATCGGAGCCGGGATCTGCGCTTCCTACCAGACA |
| | | CAAACGAATAGTCCCGGATCTGCCTCAAGCGTGGCATCTCAATCCATTATAGCATATACGATGTCCCTTGGAGCTGAA |
| | | AACAGCGTTGCGTATTCAAACAATAGTATCGCTATTCCAACCAATTTTACAATTAGCGTGACCACAGAAATACTCCCTG |
| | | TGAGCATGACCAAGACCAGTGTAGACTGTACTATGTACATCTGCGGCGACAGTACTGAGTGTAGCAATCTGCTGCTAC |
| | | AGTATGGGTCCTTCTGTACTCAGCTTAATCGGGCTCTCACCGGAATCGCTGTAGAGCAAGATAAAAACACACAAGAAG |
| | | TGTTTGCTCAAGTGAAGCAGATCTATAAGACACCTCCCATCAAGGATTTCGGTGGGTTCAACTTTAGCCAGATTCTGC |
| | | CCGATCCGTCTAAACCGTCCAAGCGAAGTTTCATCGAAGACCTGCTTTTCAATAAGGTCACGCTGGCAGATGCTGGAT |
| | | TTATCAAACAGTACGGCGACTGTCTGGGCGATATCGCCGCAAGAGACTTGATATGCGCCCAAAAGTTTAATGGGTTAA |
| | | CCGTCCTTCCACCGCTCCTGACAGACGAGATGATCGCCCAGTATACAAGTGCCTTATTAGCTGGGACCATTACTAGTG |
| | | GATGGACATTTGGCGCCGGGGCTGCTCTACAGATACCCTTCGCCATGCAGATGGCTTACCGCTTCAACGGAATCGGA |
| | | GTTACCCAGAACGTACTGTACGAAAATCAGAAACTCATAGCTAATCAATTTAACTCTGCCATCGGGAAGATTCAGGATT |
| | | CCCTGTCGTCTACAGCGTCCGCCTTGGGGAAACTGCAAGATGTAGTGAACCAGAACGCCCAGGCCTTAAATACTCTG |
| | | GTCAAGCAGTTATCTTCAAATTTCGGAGCAATTAGCTCTGTGTTGAACGATATTCTTTCCAGGCTGGACCCTCCAGAAG |
| | | CCGAAGTGCAAATAGACCGGCTCATCACGGGGCGCTTGCAAAGCCTGCAAACCTATGTCACCCAGCAACTGATTCGA |
| | | GCAGCCGAGATCCGGGCCAGTGCTAATCTGGCCGCCACAAAAATGAGCGAGTGCGTCCTCGGGCAGAGCAAACGCG |
| | | TAGACTTCTGCGGTAAAGGCTATCACCTGATGAGCTTCCCTCAGAGCGCACCCCACGGGGTGGTCTTCCTCCACGTT |
| | | ACCTACGTCCCTGCGCAGGAGAAGAACTTCACTACGGCCCCTGCAATTTGCCACGATGGCAAGGCCCACTTTCCCAG |
| | | GGAGGGGGTCTTCGTTTCCAACGGGACTCATTGGTTCGTGACTCAGAGAAATTTTTATGAACCTCAGATCATTACCAC |
| | | TGATAATACATTCGTGTCTGGCAACTGTGATGTGGTTATTGGGATAGTTAATAATACGGTATACGACCCACTCCAGCCC |
| | | GAGCTGGACTCCTTCAAAGAGGAGCTGGACAAGTACTTTAAAAATCACACCTCACCTGATGTGGACCTAGGTGACATA |
| | | TCTGGCATAAATGCTAGCGTGGTTAACATTCAGAAGGAAATCGACAGACTCAACGAGGTGGCCAAAAATCTGAACGAG |
| | | AGTCTGATCGACCTGCAGGAGTTGGGAAAATATGAACAGTACATCAAATGGCCATGGTACATCTGGCTGGGCTTCATA |
| | | GCAGGCCTGATCGCCATCGTCATGGTGACTATTATGCTGTGCTGCATGACATCCTGTTGTAGCTGTTTGAAGGGGTGT |
| | | TGCTCCTGCGGCTCATGCTGCAAATTCGACGAGGACGATTCAGAACCTGTGCTGAAGGGAGTGAAGCTGCATTACAC |
| | | ATAA |
| 30 | ORF41 | ATGTTCGTTTTCCTTGTTTTACTGCCCCTCGTGTCTTCACAGTGTAGGGTTCAGCCTACTGAGTCCATCGTGAGATTCC |
| | | CAAACATCACAAATCTTTGTCCCTTCGGTGAGGTATTCAATGCGACACGATTTGCCTCAGTGTACGCGTGGAATCGGA |
| | | AGAGGATCTCCAATTGCGTGGCCGACTACTCCGTCTTATACAACTCAGCTAGCTTTTCAACATTCAAGTGCTATGGCG |
| | | TGAGCCCTACCAAGCTCAATGACCTGTGCTTCACTAATGTGTATGCCGACTCTTTTGTCATTCGCGGCGACGAGGTCC |
| | | GACAAATCGCACCGGGCCAAACCGGTAAAATTGCCGACTACAACTACAAGCTGCCTGACGACTTCACCGGCTGCGTA |
| | | ATCGCCTGGAACAGCAATAACCTGGATAGCAAAGTGGGCGGAAACTACAACTACCTGTACCGGCTCTTTAGAAAGTC |
| | | CAACCTGAAACCATTCGAGCGCGATATCTCGACCGAAATCTACCAGGGGGCAGCACCCCCTGTAATGGTGTAGAAG |
| | | GGTTCAATTGTTACTTTCCACTCCAGAGTTATGGGTTCCAGCCGACCAATGGCGTCGGTTATCAACCATATCGCGTTG |
| | | TGGTGTTGTCCTTTGAGCTGCTACACGCCCCAGCTACAGTGTGCGGGCCAAAGAAAAGCACAAATCTTGTCAAGAAC |
| | | AAATGCGTTAACTTTTAA |
| 31 | EMCV IRES | ACGTTACTGGCCGAAGCCGCTTGGAATAAGGCCGGTGTGCGTTTGTCTATATGTTATTTTCCACCATATTGCCGTCTTT |
| | | TGGCAATGTGAGGGCCCGGAAACCTGGCCCTGTCTTCTTGACGAGCATTCCTAGGGGTCTTTCCCCTCTCGCCAAAG |
| | | GAATGCAAGGTCTGTTGAATGTCGTGAAGGAAGCAGTTCCTCTGGAAGCTTCTTGAAGACAAACAACGTCTGTAGCGA |
| | | CCCTTTGCAGGCAGCGGAACCCCCCACCTGGCGACAGGTGCCTCTGCGGCCAAAAGCCACGTGTATAAGATACACC |
| | | TGCAAAGGCGGCACAACCCCAGTGCCACGTTGTGAGTTGGATAGTTGTGGAAAGAGTCAAATGGCTCTCCTCAAGCG |
| | | TATTCAACAAGGGGCTGAAGGATGCCCAGAAGGTACCCCATTGTATGGGATCTGATCTGGGGCCTCGGTGCACATGC |
| | | TTTACATGTGTTTAGTCGAGGTTAAAAAACGTCTAGGCCCCCCGAACCACGGGGACGTGGTTTTCCTTTGAAAAACAC |
| | | GATGATAATA |
| 32 | 5′ UTR | ACTCTTCTGGTCCCCACAGACTCAGAGAGAACCCACC |
| | Globin | |
| 33 | 3′ UTR | GCTGGAGCCTCGGTAGCCGTTCCTCCTGCCCGCTGGGCCTCCCAACGGGCCCTCCTCCCCTCCTTGCACCGGCCCT |
| | Globin | TCCTGGTCTTTGAATAAAGTCTGAGTGGGCAGCA |
| 45 | CVB3 | TTAAAACAGCCTGTGGGTTGATCCCACCCACAGGCCCATTGGGCGCTAGCACTCTGGTATCACGGTACCTTTGTGCG |
| | | CCTGTTTTATACCCCCTCCCCCAACTGTAACTTAGAAGTAACACACACCGATCAACAGTCAGCGTGGCACACCAGCCA |
| | | CGTTTTGATCAAGCACTTCTGTTACCCCGGACTGAGTATCAATAGACTGCTCACGCGGTTGAAGGAGAAAGCGTTCGT |
| | | TATCCGGCCAACTACTTCGAAAAACCTAGTAACACCGTGGAAGTTGCAGAGTGTTTCGCTCAGCACTACCCCAGTGTA |
| | | GATCAGGTCGATGAGTCACCGCATTCCCCACGGGCGACCGTGGCGGTGGCTGCGTTGGCGGCCTGCCCATGGGGA |
| | | AACCCATGGGACGCTCTAATACAGACATGGTGCGAAGAGTCTATTGAGCTAGTTGGTAGTCCTCCGGCCCCTGAATG |
| | | CGGCTAATCCTAACTGCGGAGCACACACCCTCAAGCCAGAGGGCAGTGTGTCGTAACGGGCAACTCTGCAGCGGAA |
| | | CCGACTACTTTGGGTGTCCGTGTTTCATTTTATTCCTATACTGGCTGCTTATGGTGACAATTGAGAGATCGTTACCATA |
| | | TAGCTATTGGATTGGCCATCCGGTGACTAATAGAGCTATTATATATCCCTTTGTTGGGTTTATACCACTTAGCTTGAAA |
| | | GAGGTTAAAACATTACAATTCATTGTTAAGTTGAATACAGCAAA |
| 46 | WT EMCV | CGCGGATCCTAATACGACTCACTATAGGGAATAGCCGAAAAACAAAAAACAAAAAAAACAAAAAAAAAACCAAAAAAAC |
| | GLuc IS | AAAACACAACGTTACTGGCCGAAGCCGCTTGGAATAAGGCCGGTGTGCGTTTGTCTATATGTTATTTTCCACCATATT |
| | | GCCGTCTTTTGGCAATGTGAGGGCCCGGAAACCTGGCCCTGTCTTCTTGACGAGCATTCCTAGGGGTCTTTCCCCTC |
| | | TCGCCAAAGGAATGCAAGGTCTGTTGAATGTCGTGAAGGAAGCAGTTCCTCTGGAAGCTTCTTGAAGACAAACAACGT |
| | | CTGTAGCGACCCTTTGCAGGCAGCGGAACCCCCCACCTGGCGACAGGTGCCTCTGCGGCCAAAAGCCACGTGTATA |
| | | AGATACACCTGCAAAGGCGGCACAACCCCAGTGCCACGTTGTGAGTTGGATAGTTGTGGAAAGAGTCAAATGGCTCT |
| | | CCTCAAGCGTATTCAACAAGGGGCTGAAGGATGCCCAGAAGGTACCCCATTGTATGGGATCTGATCTGGGGCCTCGG |
| | | TGCACATGCTTTACATGTGTTTAGTCGAGGTTAAAAAACGTCTAGGCCCCCCGAACCACGGGGACGTGGTTTTCCTTT |
| | | GAAAAACACGATGATAATAGCCACCATGGGAGTCAAAGTTCTGTTTGCCCTGATCTGCATCGCTGTGGCCGAGGCCA |
| | | AGCCCACCGAGAACAACGAAGACTTCAACATCGTGGCCGTGGCCAGCAACTTCGCGACCACGGATCTCGATGCTGA |
| | | CCGCGGGAAGTTGCCCGGCAAGAAGCTGCCGCTGGAGGTGCTCAAAGAGATGGAAGCCAATGCCCGGAAAGCTGG |
| | | CTGCACCAGGGGCTGTCTGATCTGCCTGTCCCACATCAAGTGCACGCCCAAGATGAAGAAGTTCATCCCAGGACGCT |
| | | GCCACACCTACGAAGGCGACAAAGAGTCCGCACAGGGGGGCATAGGCGAGGCGATCGTCGACATTCCTGAGATTCC |
| | | TGGGTTCAAGGACTTGGAGCCCATGGAGCAGTTCATCGCACAGGTCGATCTGTGTGTGGACTGCACAACTGGCTGCC |
| | | TCAAAGGGCTTGCCAACGTGCAGTGTTCTGACCTGCTCAAGAAGTGGCTGCCGCAACGCTGTGCGACCTTTGCCAGC |
| | | AAGATCCAGGGCCAGGTGGACAAGATCAAGGGGGCCGGTGGTGACTAAAAAAAACAAAAAACAAAACGGCTATT |
| 47 | Splint | GTTTTTCGGCTATTCCCAATAGCCGTTTTG |
| 48 | ORF44 | ATGTACCGGATGCAGTTGTTGTCCTGTATAGCTCTTTCCCTTGCATTGGTCACTAATTCTagagtccaaccaacagaatctattgtta |
| | | gatttcctaatattacaaacttgtgcccttttggtgaagtttttaacgccaccagatttgcatccgtgtatgcttggaacaggaagagaatcagcaactgtgttgctgattattctgtcct |
| | | atataattccgcatcattttccacttttaagtgttatggagtgtctcctactaaattaaatgatctctgctttactaatgtctatgcagattcatttgtaattagaggtgatgaagtcagaca |
| | | aatcgctccagggcaaactggaaagattgctgattataattataaattaccagatgattttacaggctgcgttatagcttggaattctaacaatcttgattctaaggttggtggtaatt |
| | | ataattacctgtatagattgtttaggaagtctaatctcaaaccttttgagagagatatttcaactgaaatctatcaggccggtagcacaccttgtaatggtgttgaaggttttaattgtt |
| | | actttcctttacaatcatatggtttccaacccactaatggtgttggttaccaaccatacagagtagtagtactttcttttgaacttctacatgcaccagcaactgtttgtggacctaaaa |
| | | agtctactaatttggttaaaaacaaatgtgtcaatttcTAA |
| 49 | ORF45 | ATGGGAGTCAAAGTTCTGTTTGCCCTGATCTGCATCGCTGTGGCCGAGGCCAAGagagtccaaccaacagaatctattgttagatttcc |
| | | taatattacaaacttgtgcccttttggtgaagtttttaacgccaccagatttgcatccgtgtatgcttggaacaggaagagaatcagcaactgtgttgctgattattctgtcctatataa |
| | | ttccgcatcattttccacttttaagtgttatggagtgtctcctactaaattaaatgatctctgctttactaatgtctatgcagattcatttgtaattagaggtgatgaagtcagacaaatcg |
| | | ctccagggcaaactggaaagattgctgattataattataaattaccagatgattttacaggctgcgttatagcttggaattctaacaatcttgattctaaggttggtggtaattataatt |
| | | acctgtatagattgtttaggaagtctaatctcaaaccttttgagagagatatttcaactgaaatctatcaggccggtagcacaccttgtaatggtgttgaaggttttaattgttactttcc |
| | | tttacaatcatatggtttccaacccactaatggtgttggttaccaaccatacagagtagtagtactttcttttgaacttctacatgcaccagcaactgtttgtggacctaaaaagtcta |
| | | ctaatttggttaaaaacaaatgtgtcaatttcTAA |
| 50 | IL2 | ATGTACCGGATGCAGTTGTTGTCCTGTATAGCTCTTTCCCTTGCATTGGTCACTAATTCT |
| | secretion | |
| | signal | |
| 51 | Gluc | ATGGGAGTCAAAGTTCTGTTTGCCCTGATCTGCATCGCTGTGGCCGAGGCCAAG |
| | secretion | |
| | signal | |
| 52 | Synthetic | D(V/I)ExNPGP |
| | Construct | |
| 53 | Severe | MFVFLVLLPLVSSQCVNLTTRTQLPPAYTNSFTRGVYYPDKVFRSSVLHSTQDLFLPFFSNVTWFHAIHVSGTNGTKRFDN |
| | acute | PVLPFNDGVYFASTEKSNIIRGWIFGTTLDSKTQSLLIVNNATNVVIKVCEFQFCNDPFLGVYYHKNNKSWMESEFRVYSSA |
| | respiratory | NNCTFEYVSQPFLMDLEGKQGNFKNLREFVFKNIDGYFKIYSKHTPINLVRDLPQGFSALEPLVDLPIGINITRFQTLLALHRS |
| | syndrome | YLTPGDSSSGWTAGAAAYYVGYLQPRTFLLKYNENGTITDAVDCALDPLSETKCTLKSFTVEKGIYQTSNFRVQPTESIVRF |
| | coronavirus | PNITNLCPFGEVFNATRFASVYAWNRKRISNCVADYSVLYNSASFSTFKCYGVSPTKLNDLCFTNVYADSFVIRGDEVRQIA |
| | 2 | PGQTGKIADYNYKLPDDFTGCVIAWNSNNLDSKVGGNYNYLYRLFRKSNLKPFERDISTEIYQAGSTPCNGVEGFNCYFPL |
| | | QSYGFQPTNGVGYQPYRVVVLSFELLHAPATVCGPKKSTNLVKNKCVNFNFNGLTGTGVLTESNKKFLPFQQFGRDIADTT |
| | | DAVRDPQTLEILDITPCSFGGVSVITPGTNTSNQVAVLYQDVNCTEVPVAIHADQLTPTWRVYSTGSNVFQTRAGCLIGAEH |
| | | VNNSYECDIPIGAGICASYQTQTNSPRRARSVASQSIIAYTMSLGAENSVAYSNNSIAIPTNFTISVTTEILPVSMTKTSVDCT |
| | | MYICGDSTECSNLLLQYGSFCTQLNRALTGIAVEQDKNTQEVFAQVKQIYKTPPIKDFGGFNFSQILPDPSKPSKRSFIEDLL |
| | | FNKVTLADAGFIKQYGDCLGDIAARDLICAQKFNGLTVLPPLLTDEMIAQYTSALLAGTITSGWTFGAGAALQIPFAMQMAYR |
| | | FNGIGVTQNVLYENQKLIANQFNSAIGKIQDSLSSTASALGKLQDVVNQNAQALNTLVKQLSSNFGAISSVLNDILSRLDPPE |
| | | AEVQIDRLITGRLQSLQTYVTQQLIRAAEIRASANLAATKMSECVLGQSKRVDFCGKGYHLMSFPQSAPHGVVFLHVTYVPA |
| | | QEKNFTTAPAICHDGKAHFPREGVFVSNGTHWFVTQRNFYEPQIITTDNTFVSGNCDVVIGIVNNTVYDPLQPELDSFKEEL |
| | | DKYFKNHTSPDVDLGDISGINASVVNIQKEIDRLNEVAKNLNESLIDLQELGKYEQYIKWPWYIWLGFIAGLIAIVMVTIMLCC |
| | | MTSCCSCLKGCCSCGSCCKFDEDDSEPVLKGVKLHYT |
| 54 | Severe | atgtttgtttttcttgttttattgccactagtctctagtcagtgtgttaatcttacaaccagaactcaattaccccctgcatacactaattctttcacacgtggtgtttattaccctgacaa |
| | acute | agttttcagatcctcagttttacattcaactcaggatttgttcttacctttcttttccaatgttacttggttccatgctatacatgtctctgggaccaatggtactaagaggtttgataacc |
| | respiratory | ctgtcctaccatttaatgatggtgtttattttgcttccactgagaagtctaacataataagaggctggatctttggtactactttagattcgaagacccagtccctacttattgttaataac |
| | syndrome | gctactaatgttgttattaaagtctgtgaatttcaattttgtaatgatccatttttgggtgtttattaccacaaaaacaacaaaagttggatggaaagtgagttcagagtttattctagtgc |
| | coronavirus | gaataattgcacttttgaatatgtctctcagccttttcttatggaccttgaaggaaaacagggtaatttcaaaaatcttagggaatttgtgtttaagaatattgatggttattttaaaatat |
| | 2 | attctaagcacacgcctattaatttagtgcgtgatctccctcagggtttttcggctttagaaccattggtagatttgccaataggtattaacatcactaggtttcaaactttacttgcttta |
| | | catagaagttatttgactcctggtgattcttcttcaggttggacagctggtgctgcagcttattatgtgggttatcttcaacctaggacttttctattaaaatataatgaaaatggaaccat |
| | | tacagatgctgtagactgtgcacttgaccctctctcagaaacaaagtgtacgttgaaatccttcactgtagaaaaaggaatctatcaaacttctaactttagagtccaaccaacaga |
| | | atctattgttagatttcctaatattacaaacttgtgcccttttggtgaagtttttaacgccaccagatttgcatccgtgtatgcttggaacaggaagagaatcagcaactgtgttgctga |
| | | ttattctgtcctatataattccgcatcattttccacttttaagtgttatggagtgtctcctactaaattaaatgatctctgctttactaatgtctatgcagattcatttgtaattagaggtg |
| | | atgaagtcagacaaatcgctccagggcaaactggaaagattgctgattataattataaattaccagatgattttacaggctgcgttatagcttggaattctaacaatcttgattctaaggtt |
| | | ggtggtaattataattacctgtatagattgtttaggaagtctaatctcaaaccttttgagagagatatttcaactgaaatctatcaggccggtagcacaccttgtaatggtgttgaag |
| | | gttttaattgttactttcctttacaatcatatggtttccaacccactaatggtgttggttaccaaccatacagagtagtagtactttcttttgaacttctacatgcaccagcaactgtttgt |
| | | ggacctaaaaagtctactaatttggttaaaaacaaatgtgtcaatttcaacttcaatggtttaacaggcacaggtgttcttactgagtctaacaaaaagtttctgcctttccaacaattt |
| | | ggcagagacattgctgacactactgatgctgtccgtgatccacagacacttgagattcttgacattacaccatgttcttttggtggtgtcagtgttataacaccaggaacaaatact |
| | | tctaaccaggttgctgttctttatcaggatgttaactgcacagaagtccctgttgctattcatgcagatcaacttactcctacttggcgtgtttattctacaggttctaatgtttttcaaac |
| | | acgtgcaggctgtttaataggggctgaacatgtcaacaactcatatgagtgtgacatacccattggtgcaggtatatgcgctagttatcagactcagactaattctcctcggggg |
| | | cacgtagtgtagctagtcaatccatcattgcctacactatgtcacttggtgcagaaaattcagttgcttactctaataactctattgccatacccacaaattttactattagtgttacca |
| | | cagaaattctaccagtgtctatgaccaagacatcagtagattgtacaatgtacatttgtggtgattcaactgaatgcagcaatcttttgttgcaatatggcagtttttgtacacaatta |
| | | aaccgtgctttaactgggatagctgttgaacaagacaaaaacacccaagaagtttttgcacaagtcaaacaaatttacaaaacaccaccaattaaagattttggtggttttaatt |
| | | tttcacaaatattaccagatccatcaaaaccaagcaagaggtcatttattgaagatctacttttcaacaaagtgacacttgcagatgctggcttcatcaaacaatatggtgattgc |
| | | cttggtgatattgctgctagggacctcatttgtgcacaaaagtttaacggccttactgttttgccacctttgctcacagatgaaatgattgctcaatacacttctgcactgttagcgggt |
| | | acaatcacttctggttggacctttggtgcaggtgctgcattacaaataccatttgctatgcaaatggcttataggtttaatggtattggagttacacagaatgttctctatgagaacca |
| | | aaaattgattgccaaccaatttaatagtgccattggcaaaattcaagactcactttcttccacagcaagtgcacttggaaaacttcaagatgtggtcaaccaaaatgcacaagc |
| | | tttaaacacgcttgttaaacaacttagctccaattttggtgcaatttcaagtgttttaaatgatatcctttcacgtcttgaccctcccgaggctgaagtgcaaattgataggttgatcac |
| | | aggcagacttcaaagtttgcagacatatgtgactcaacaattaattagagctgcagaaatcagagcttctgctaatcttgctgctactaaaatgtcagagtgtgtacttggacaat |
| | | caaaaagagttgatttttgtggaaagggctatcatcttatgtccttccctcagtcagcacctcatggtgtagtcttcttgcatgtgacttatgtccctgcacaagaaaagaacttcac |
| | | aactgctcctgccatttgtcatgatggaaaagcacactttcctcgtgaaggtgtctttgtttcaaatggcacacactggtttgtaacacaaaggaatttttatgaaccacaaatcatt |
| | | actacagacaacacatttgtgtctggtaactgtgatgttgtaataggaattgtcaacaacacagtttatgatcctttgcaacctgaattagactcattcaaggaggagttagataaa |
| | | tattttaagaatcatacatcaccagatgttgatttaggtgacatctctggcattaatgcttcagttgtaaacattcaaaaagaaattgaccgcctcaatgaggttgccaagaatttaa |
| | | atgaatctctcatcgatctccaagaacttggaaagtatgagcagtatataaaatggccatggtacatttggctaggttttatagctggcttgattgccatagtaatggtgacaattat |
| | | gctttgctgtatgaccagttgctgtagttgtctcaagggctgttgttcttgtggatcctgctgcaaatttgatgaagacgactctgagccagtgctcaaaggagtcaaattacattac |
| | | aca |
| 55 | Synthetic | MGVKVLFALICIAVAEAKRVQPTESIVRFPNITNLCPFGEVFNATRFASVYAWNRKRISNCVADYSVLYNSASFSTFKCYGVS |
| | Construct | PTKLNDLCFTNVYADSFVIRGDEVRQIAPGQTGKIADYNYKLPDDFTGCVIAWNSNNLDSKVGGNYNYLYRLFRKSNLKPFE |
| | | RDISTEIYQAGSTPCNGVEGFNCYFPLQSYGFQPTNGVGYQPYRVVVLSFELLHAPATVCGPKKSTNLVKNKCVNF |
| 56 | Synthetic | atgggagtcaaagttctgtttgccctgatctgcattgctgtggccgaggccaagagagtccaaccaacagaatctattgttagatttcctaatattacaaacttgtgcccttttggtg |
| | Construct | aagtttttaacgccaccagatttgcatccgtgtatgcttggaacaggaagagaatcagcaactgtgttgctgattattctgtcctatataattccgcatcattttccacttttaagtgttat |
| | | ggagtgtctcctactaaattaaatgatctctgctttactaatgtctatgcagattcatttgtaattagaggtgatgaagtcagacaaatcgctccagggcaaactggaaagattgct |
| | | gattataattataaattaccagatgattttacaggctgcgttatagcttggaattctaacaatcttgattctaaggttggtggtaattataattacctgtatagattgtttaggaagtctaa |
| | | tctcaaaccttttgagagagatatttcaactgaaatctatcaggccggtagcacaccttgtaatggtgttgaaggttttaattgttactttcctttacaatcatatggtttccaacccact |
| | | aatggtgttggttaccaaccatacagagtagtagtactttcttttgaacttctacatgcaccagcaactgtttgtggacctaaaaagtctactaatttggttaaaaacaaatgtgtca |
| | | atttc |
| 57 | Synthetic | MGVKVLFALICIAVAEAKPTENNEDFNIVAVASNFATTDLDADRGKLPGKKLPLEVLKEMEANARKAGCTRGCLICLSHIKCT |
| | Construct | PKMKKFIPGRCHTYEGDKESAQGGIGEAIVDIPEIPGFKDLEPMEQFIAQVDLCVDCTTGCLKGLANVQCSDLLKKWLPQRC |
| | | ATFASKIQGQVDKIKGAGGD |
| 58 | Synthetic | atgggagtcaaagttctgtttgccctgatctgcatcgctgtggccgaggccaagcccaccgagaacaacgaagacttcaacatcgtggccgtggccagcaacttcgcgacc |
| | Construct | acggatctcgatgctgaccgcgggaagttgcccggcaagaagctgccgctggaggtgctcaaagagatggaagccaatgcccggaaagctggctgcaccaggggctgt |
| | | ctgatctgcctgtcccacatcaagtgcacgcccaagatgaagaagttcatcccaggacgctgccacacctacgaaggcgacaaagagtccgcacagggcggcataggc |
| | | gaggcgatcgtcgacattcctgagattcctgggttcaaggacttggagcccatggagcagttcatcgcacaggtcgatctgtgtgtggactgcacaactggctgcctcaaagg |
| | | gcttgccaacgtgcagtgttctgacctgctcaagaagtggctgccgcaacgctgtgcgacctttgccagcaagatccagggccaggtggacaagatcaagggggccggtg |
| | | gtgactaa |
| 59 | Influenza | MKAILVVLLYTFATANADTLCIGYHANNSTDTVDTVLEKNVTVTHSVNLLEDKHNGKLCKLRGVAPLHLGKCNIAGWILGNPE |
| | A virus | CESLSTASSWSYIVETPSSDNGTCYPGDFIDYEELREQLSSVSSFERFEIFPKTSSWPNHDSNKGVTAACPHAGAKSFYKN |
| | | LIWLVKKGNSYPKLSKSYINDKGKEVLVLWGIHHPSTSADQQSLYQNADAYVFVGSSRYSKKFKPEIAIRPKVRDQEGRMN |
| | | YYWTLVEPGDKITFEATGNLVVPRYAFAMERNAGSGIIISDTPVHDCNTTCQTPKGAINTSLPFQNIHPITIGKCPKYVKSTKL |
| | | RLATGLRNIPSIQSRGLFGAIAGFIEGGWTGMVDGWYGYHHQNEQGSGYAADLKSTQNAIDEITNKVNSVIEKMNTQFTAV |
| | | GKEFNHLEKRIENLNKKVDDGFLDIWTYNAELLVLLENERTLDYHDSNVKNLYEKVRSQLKNNAKEIGNGCFEFYHKCDNT |
| | | CMESVKNGTYDYPKYSEEAKLNREEIDGVKLESTRIYQILAIYSTVASSLVLVVSLGAISFWMCSNGSLQCRICI |
| 60 | Influenza | atgaaagcaatactagtagttcttctatatacatttgcaaccgctaacgctgatacattgtgtataggatatcacgcgaacaactccaccgatacagtagatacagtactagaga |
| | A virus | agaacgtaacagtaacacattctgttaatcttctagaagacaagcataacggcaaactgtgcaaactaagaggtgtagccccattgcatctaggaaagtgtaatatagctgg |
| | | ctggattttgggaaatccagagtgtgaatcattaagtacagcaagctcctggtcctatatagtggaaacacctagtagtgataacggaacgtgttacccaggagattttatagatt |
| | | acgaggagctaagagagcagctgtcgtcagtatcatcatttgaaaggtttgaaattttcccgaaaacatcctcctggcccaatcacgatagtaacaaaggagtaacagcagc |
| | | ctgtcctcacgctggagcaaaaagcttctataaaaatttaatctggctagtgaagaagggaaattcatatccaaagctaagtaaaagttatataaacgataagggcaaggaa |
| | | gtactcgtactgtggggcattcatcatccatctactagtgctgatcaacaaagtttatatcaaaacgcagacgcatacgtttttgtggggtcaagtagatatagcaagaaatttaa |
| | | accagaaatagcaataagacctaaagtaagggatcaagaaggcagaatgaactattattggacactagtagaaccgggagataaaataacttttgaagcaacaggaaat |
| | | ctagtggttcccaggtacgcatttgcaatggaaagaaacgctggatcaggcatcattatatctgatacaccagtccacgattgtaatacaacttgtcaaacacctaaaggagct |
| | | ataaacaccagcttaccatttcaaaatattcatcctatcacaattggaaagtgtccaaaatacgtaaaaagtacaaaattgagattggccacaggattacgaaatattccatca |
| | | attcaatctagaggactttttggtgcaattgcaggtttcatagaaggaggctggactgggatggtagacggctggtacggttatcatcatcaaaacgaacagggaagtggata |
| | | cgcagctgatcttaaaagtacacaaaacgcaattgacgagattactaataaagtaaattctgtaattgaaaaaatgaatactcagtttacagcagtagggaaagagtttaacc |
| | | acctggaaaaaagaatagaaaatttaaataaaaaagtagacgacggatttcttgacatttggacttataacgccgaactattggtattactagaaaacgaaagaactctagat |
| | | tatcacgattcaaacgtaaaaaatttatacgaaaaagtaagaagccaacttaaaaataacgcaaaagaaataggaaacggctgttttgaattttatcacaagtgtgataatac |
| | | ctgcatggaaagtgttaaaaacgggacatacgattatccaaaatactcagaagaagcaaaattaaatagagaagaaatagacggcgtaaaattagaatcaacaaggata |
| | | tatcaaatattagcaatatattcaactgtcgcttcttcattggtactggtagtttctctaggtgcaatatcattttggatgtgctctaacggctccctacagtgtagaatttgtata |
| 61 | Hepatitis | ggccaccgacaagaggcggcagcccagaccacccgaaagaggagacgcggaccgccgcccaagcgagcagagcc |
| | D virus | |
| 62 | Hepatitis | ggcagaggcggcagcccagaccacccgaaagaggagacgcggaccgccgcccgagcc |
| | D virus | |
| 63 | P46 | MGVHECPAWLWLLLSLLSLPLGLPVLGARVQPTESIVRFPNITNLCPFGEVFNATRFASVYAWNRKRISNCVADYSVLYNSA |
| | | SFSTFKCYGVSPTKLNDLCFTNVYADSFVIRGDEVRQIAPGQTGKIADYNYKLPDDFTGCVIAWNSNNLDSKVGGNYNYLY |
| | | RLFRKSNLKPFERDISTEIYQAGSTPCNGVEGENCYFPLQSYGFQPTNGVGYQPYRVVVLSFELLHAPATVCGPKKSTNLV |
| | | KNKCVNF |
| 64 | P47 | MYRMQLLSCIALSLALVTNSRVQPTESIVRFPNITNLCPFGEVFNATRFASVYAWNRKRISNCVADYSVLYNSASFSTFKCY |
| | | GVSPTKLNDLCFTNVYADSFVIRGDEVRQIAPGQTGKIADYNYKLPDDFTGCVIAWNSNNLDSKVGGNYNYLYRLFRKSNL |
| | | KPFERDISTEIYQAGSTPCNGVEGFNCYFPLQSYGFQPTNGVGYQPYRVVVLSFELLHAPATVCGPKKSTNLVKNKCVNF |
| 65 | P48 | MGVKVLFALICIAVAEAKRVQPTESIVRFPNITNLCPFGEVFNATRFASVYAWNRKRISNCVADYSVLYNSASFSTFKCYGVS |
| | | PTKLNDLCFTNVYADSFVIRGDEVRQIAPGQTGKIADYNYKLPDDFTGCVIAWNSNNLDSKVGGNYNYLYRLFRKSNLKPFE |
| | | RDISTEIYQAGSTPCNGVEGFNCYFPLQSYGFQPTNGVGYQPYRVVVLSFELLHAPATVCGPKKSTNLVKNKCVNF |
| 66 | P49 | MGVHECPAWLWLLLSLLSLPLGLPVLGARVQPTESIVRFPNITNLCPFGEVFNATRFASVYAWNRKRISNCVADYSVLYNSA |
| | | SFSTFKCYGVSPTKLNDLCFTNVYADSFVIRGDEVRQIAPGQTGKIADYNYKLPDDFTGCVIAWNSNNLDSKVGGNYNYLY |
| | | RLFRKSNLKPFERDISTEIYQAGSTPCNGVEGFNCYFPLQSYGFQPTNGVGYQPYRVVVLSFELLHAPATVCGPKKSTNLV |
| | | KNKCVNF |
| 67 | P50 | MYRMQLLSCIALSLALVTNSRVQPTESIVRFPNITNLCPFGEVFNATRFASVYAWNRKRISNCVADYSVLYNSASFSTFKCY |
| | | GVSPTKLNDLCFTNVYADSFVIRGDEVRQIAPGQTGKIADYNYKLPDDFTGCVIAWNSNNLDSKVGGNYNYLYRLFRKSNL |
| | | KPFERDISTEIYQAGSTPCNGVEGENCYFPLQSYGFQPTNGVGYQPYRVVVLSFELLHAPATVCGPKKSTNLVKNKCVNF |
| 68 | P52 | MYRMQLLSCIALSLALVTNSVNLTTRTQLPPAYTNSFTRGVYYPDKVFRSSVLHSTQDLFLPFFSNVTWFHAIHVSGTNGTK |
| | | RFDNPVLPFNDGVYFASTEKSNIIRGWIFGTTLDSKTQSLLIVNNATNVVIKVCEFQFCNDPFLGVYYHKNNKSWMESEFRV |
| | | YSSANNCTFEYVSQPFLMDLEGKQGNFKNLREFVFKNIDGYFKIYSKHTPINLVRDLPQGFSALEPLVDLPIGINITRFQTLLA |
| | | LHRSYLTPGDSSSGWTAGAAAYYVGYLQPRTFLLKYNENGTITDAVDCALDPLSETKCTLKSFTVEKGIYQTSNFRVQPTE |
| | | SIVRFPNITNLCPFGEVFNATRFASVYAWNRKRISNCVADYSVLYNSASFSTFKCYGVSPTKLNDLCFTNVYADSFVIRGDE |
| | | VRQIAPGQTGKIADYNYKLPDDFTGCVIAWNSNNLDSKVGGNYNYLYRLFRKSNLKPFERDISTEIYQAGSTPCNGVEGEN |
| | | CYFPLQSYGFQPTNGVGYQPYRVVVLSFELLHAPATVCGPKKSTNLVKNKCVNFNFNGLTGTGVLTESNKKFLPFQQFGR |
| | | DIADTTDAVRDPQTLEILDITPCSFGGVSVITPGTNTSNQVAVLYQDVNCTEVPVAIHADQLTPTWRVYSTGSNVFQTRAGC |
| | | LIGAEHVNNSYECDIPIGAGICASYQTQTNSPGSASSVASQSIIAYTMSLGAENSVAYSNNSIAIPTNFTISVTTEILPVSMTKT |
| | | SVDCTMYICGDSTECSNLLLQYGSFCTQLNRALTGIAVEQDKNTQEVFAQVKQIYKTPPIKDFGGFNFSQILPDPSKPSKRS |
| | | FIEDLLFNKVTLADAGFIKQYGDCLGDIAARDLICAQKFNGLTVLPPLLTDEMIAQYTSALLAGTITSGWTFGAGAALQIPFAM |
| | | QMAYRFNGIGVTQNVLYENQKLIANQFNSAIGKIQDSLSSTASALGKLQDVVNQNAQALNTLVKQLSSNFGAISSVLNDILSR |
| | | LDPPEAEVQIDRLITGRLQSLQTYVTQQLIRAAEIRASANLAATKMSECVLGQSKRVDFCGKGYHLMSFPQSAPHGVVFLHV |
| | | TYVPAQEKNFTTAPAICHDGKAHFPREGVFVSNGTHWFVTQRNFYEPQIITTDNTFVSGNCDVVIGIVNNTVYDPLQPELDS |
| | | FKEELDKYFKNHTSPDVDLGDISGINASVVNIQKEIDRLNEVAKNLNESLIDLQELGKYEQYIKWPWYIWLGFIAGLIAIVMVTI |
| | | MLCCMTSCCSCLKGCCSCGSCCKFDEDDSEPVLKGVKLHYT |
| 69 | P54 | MGVKVLFALICIAVAEAKVNLTTRTQLPPAYTNSFTRGVYYPDKVFRSSVLHSTQDLFLPFFSNVTWFHAIHVSGTNGTKRF |
| | | DNPVLPFNDGVYFASTEKSNIIRGWIFGTTLDSKTQSLLIVNNATNVVIKVCEFQFCNDPFLGVYYHKNNKSWMESEFRVYS |
| | | SANNCTFEYVSQPFLMDLEGKQGNFKNLREFVFKNIDGYFKIYSKHTPINLVRDLPQGFSALEPLVDLPIGINITRFQTLLALH |
| | | RSYLTPGDSSSGWTAGAAAYYVGYLQPRTFLLKYNENGTITDAVDCALDPLSETKCTLKSFTVEKGIYQTSNFRVQPTESIV |
| | | RFPNITNLCPFGEVFNATRFASVYAWNRKRISNCVADYSVLYNSASFSTFKCYGVSPTKLNDLCFTNVYADSFVIRGDEVR |
| | | QIAPGQTGKIADYNYKLPDDFTGCVIAWNSNNLDSKVGGNYNYLYRLFRKSNLKPFERDISTEIYQAGSTPCNGVEGENCY |
| | | FPLQSYGFQPTNGVGYQPYRVVVLSFELLHAPATVCGPKKSTNLVKNKCVNFNFNGLTGTGVLTESNKKFLPFQQFGRDIA |
| | | DTTDAVRDPQTLEILDITPCSFGGVSVITPGTNTSNQVAVLYQDVNCTEVPVAIHADQLTPTWRVYSTGSNVFQTRAGCLIG |
| | | AEHVNNSYECDIPIGAGICASYQTQTNSPGSASSVASQSIIAYTMSLGAENSVAYSNNSIAIPTNFTISVTTEILPVSMTKTSVD |
| | | CTMYICGDSTECSNLLLQYGSFCTQLNRALTGIAVEQDKNTQEVFAQVKQIYKTPPIKDFGGFNFSQILPDPSKPSKRSFIED |
| | | LLFNKVTLADAGFIKQYGDCLGDIAARDLICAQKFNGLTVLPPLLTDEMIAQYTSALLAGTITSGWTFGAGAALQIPFAMQMA |
| | | YRFNGIGVTQNVLYENQKLIANQFNSAIGKIQDSLSSTASALGKLQDVVNQNAQALNTLVKQLSSNFGAISSVLNDILSRLDP |
| | | PEAEVQIDRLITGRLQSLQTYVTQQLIRAAEIRASANLAATKMSECVLGQSKRVDFCGKGYHLMSFPQSAPHGVVFLHVTYV |
| | | PAQEKNFTTAPAICHDGKAHFPREGVFVSNGTHWFVTQRNFYEPQIITTDNTFVSGNCDVVIGIVNNTVYDPLQPELDSFKE |
| | | ELDKYFKNHTSPDVDLGDISGINASVVNIQKEIDRLNEVAKNLNESLIDLQELGKYEQYIKWPWYIWLGFIAGLIAIVMVTIMLC |
| | | CMTSCCSCLKGCCSCGSCCKFDEDDSEPVLKGVKLHYT |
| 70 | P56 | MFVFLVLLPLVSSQCRVQPTESIVRFPNITNLCPFGEVFNATRFASVYAWNRKRISNCVADYSVLYNSASFSTFKCYGVSPT |
| | | KLNDLCFTNVYADSFVIRGDEVRQIAPGQTGKIADYNYKLPDDFTGCVIAWNSNNLDSKVGGNYNYLYRLFRKSNLKPFER |
| | | DISTEIYQAGSTPCNGVEGENCYFPLQSYGFQPTNGVGYQPYRVVVLSFELLHAPATVCGPKKSTNLVKNKCVNFGYIPEA |
| | | PRDGQAYVRKDGEWVLLSTFL |
| 71 | P59 | MFVFLVLLPLVSSQCVNLTTRTQLPPAYTNSFTRGVYYPDKVFRSSVLHSTQDLFLPFFSNVTWFHAIHVSGTNGTKRFDN |
| | | PVLPFNDGVYFASTEKSNIIRGWIFGTTLDSKTQSLLIVNNATNVVIKVCEFQFCNDPFLGVYYHKNNKSWMESEFRVYSSA |
| | | NNCTFEYVSQPFLMDLEGKQGNFKNLREFVFKNIDGYFKIYSKHTPINLVRDLPQGFSALEPLVDLPIGINITRFQTLLALHRS |
| | | YLTPGDSSSGWTAGAAAYYVGYLQPRTFLLKYNENGTITDAVDCALDPLSETKCTLKSFTVEKGIYQTSNFRVQPTESIVRF |
| | | PNITNLCPFGEVFNATRFASVYAWNRKRISNCVADYSVLYNSASFSTFKCYGVSPTKLNDLCFTNVYADSFVIRGDEVRQIA |
| | | PGQTGKIADYNYKLPDDFTGCVIAWNSNNLDSKVGGNYNYLYRLFRKSNLKPFERDISTEIYQAGSTPCNGVEGFNCYFPL |
| | | QSYGFQPTNGVGYQPYRVVVLSFELLHAPATVCGPKKSTNLVKNKCVNFNFNGLTGTGVLTESNKKFLPFQQFGRDIADTT |
| | | DAVRDPQTLEILDITPCSFGGVSVITPGTNTSNQVAVLYQDVNCTEVPVAIHADQLTPTWRVYSTGSNVFQTRAGCLIGAEH |
| | | VNNSYECDIPIGAGICASYQTQTNSPRRARSVASQSIIAYTMSLGAENSVAYSNNSIAIPTNFTISVTTEILPVSMTKTSVDCT |
| | | MYICGDSTECSNLLLQYGSFCTQLNRALTGIAVEQDKNTQEVFAQVKQIYKTPPIKDFGGFNFSQILPDPSKPSKRSFIEDLL |
| | | FNKVTLADAGFIKQYGDCLGDIAARDLICAQKFNGLTVLPPLLTDEMIAQYTSALLAGTITSGWTFGAGAALQIPFAMQMAYR |
| | | FNGIGVTQNVLYENQKLIANQFNSAIGKIQDSLSSTASALGKLQDVVNQNAQALNTLVKQLSSNFGAISSVLNDILSRLDPPE |
| | | AEVQIDRLITGRLQSLQTYVTQQLIRAAEIRASANLAATKMSECVLGQSKRVDFCGKGYHLMSFPQSAPHGVVFLHVTYVPA |
| | | QEKNFTTAPAICHDGKAHFPREGVFVSNGTHWFVTQRNFYEPQIITTDNTFVSGNCDVVIGIVNNTVYDPLQPELDSFKEEL |
| | | DKYFKNHTSPDVDLGDISGINASVVNIQKEIDRLNEVAKNLNESLIDLQELGKYEQYIKWPWYIWLGFIAGLIAIVMVTIMLCC |
| | | MTSCCSCLKGCCSCGSCCKFDEDDSEPVLKGVKLHYT |
| 72 | P60 | MFVFLVLLPLVSSQCVNLTTRTQLPPAYTNSFTRGVYYPDKVFRSSVLHSTQDLFLPFFSNVTWFHAIHVSGTNGTKRFDN |
| | | PVLPFNDGVYFASTEKSNIIRGWIFGTTLDSKTQSLLIVNNATNVVIKVCEFQFCNDPFLGVYYHKNNKSWMESEFRVYSSA |
| | | NNCTFEYVSQPFLMDLEGKQGNFKNLREFVFKNIDGYFKIYSKHTPINLVRDLPQGFSALEPLVDLPIGINITRFQTLLALHRS |
| | | YLTPGDSSSGWTAGAAAYYVGYLQPRTFLLKYNENGTITDAVDCALDPLSETKCTLKSFTVEKGIYQTSNFRVQPTESIVRF |
| | | PNITNLCPFGEVFNATRFASVYAWNRKRISNCVADYSVLYNSASFSTFKCYGVSPTKLNDLCFTNVYADSFVIRGDEVRQIA |
| | | PGQTGKIADYNYKLPDDFTGCVIAWNSNNLDSKVGGNYNYLYRLFRKSNLKPFERDISTEIYQAGSTPCNGVEGFNCYFPL |
| | | QSYGFQPTNGVGYQPYRVVVLSFELLHAPATVCGPKKSTNLVKNKCVNFNFNGLTGTGVLTESNKKFLPFQQFGRDIADTT |
| | | DAVRDPQTLEILDITPCSFGGVSVITPGTNTSNQVAVLYQGVNCTEVPVAIHADQLTPTWRVYSTGSNVFQTRAGCLIGAEH |
| | | VNNSYECDIPIGAGICASYQTQTNSPRRARSVASQSIIAYTMSLGAENSVAYSNNSIAIPTNFTISVTTEILPVSMTKTSVDCT |
| | | MYICGDSTECSNLLLQYGSFCTQLNRALTGIAVEQDKNTQEVFAQVKQIYKTPPIKDFGGFNFSQILPDPSKPSKRSFIEDLL |
| | | FNKVTLADAGFIKQYGDCLGDIAARDLICAQKFNGLTVLPPLLTDEMIAQYTSALLAGTITSGWTFGAGAALQIPFAMQMAYR |
| | | FNGIGVTQNVLYENQKLIANQFNSAIGKIQDSLSSTASALGKLQDVVNQNAQALNTLVKQLSSNFGAISSVLNDILSRLDPPE |
| | | AEVQIDRLITGRLQSLQTYVTQQLIRAAEIRASANLAATKMSECVLGQSKRVDFCGKGYHLMSFPQSAPHGVVFLHVTYVPA |
| | | QEKNFTTAPAICHDGKAHFPREGVFVSNGTHWFVTQRNFYEPQIITTDNTFVSGNCDVVIGIVNNTVYDPLQPELDSFKEEL |
| | | DKYFKNHTSPDVDLGDISGINASVVNIQKEIDRLNEVAKNLNESLIDLQELGKYEQYIKWPWYIWLGFIAGLIAIVMVTIMLCC |
| | | MTSCCSCLKGCCSCGSCCKFDEDDSEPVLKGVKLHYT |
| 73 | P61 | MFVFLVLLPLVSSQCVNLTTRTQLPPAYTNSFTRGVYYPDKVFRSSVLHSTQDLFLPFFSNVTWFHAIHVSGTNGTKRFDN |
| | | PVLPFNDGVYFASTEKSNIIRGWIFGTTLDSKTQSLLIVNNATNVVIKVCEFQFCNDPFLGVYYHKNNKSWMESEFRVYSSA |
| | | NNCTFEYVSQPFLMDLEGKQGNFKNLREFVFKNIDGYFKIYSKHTPINLVRDLPQGFSALEPLVDLPIGINITRFQTLLALHRS |
| | | YLTPGDSSSGWTAGAAAYYVGYLQPRTFLLKYNENGTITDAVDCALDPLSETKCTLKSFTVEKGIYQTSNFRVQPTESIVRF |
| | | PNITNLCPFGEVFNATRFASVYAWNRKRISNCVADYSVLYNSASFSTFKCYGVSPTKLNDLCFTNVYADSFVIRGDEVRQIA |
| | | PGQTGKIADYNYKLPDDFTGCVIAWNSNNLDSKVGGNYNYLYRLFRKSNLKPFERDISTEIYQAGSTPCNGVEGFNCYFPL |
| | | QSYGFQPTNGVGYQPYRVVVLSFELLHAPATVCGPKKSTNLVKNKCVNFNFNGLTGTGVLTESNKKFLPFQQFGRDIADTT |
| | | DAVRDPQTLEILDITPCSFGGVSVITPGTNTSNQVAVLYQDVNCTEVPVAIHADQLTPTWRVYSTGSNVFQTRAGCLIGAEH |
| | | VNNSYECDIPIGAGICASYQTQTNSPRRARSVASQSIIAYTMSLGAENSVAYSNNSIAIPTNFTISVTTEILPVSMTKTSVDCT |
| | | MYICGDSTECSNLLLQYGSFCTQLNRALTGIAVEQDKNTQEVFAQVKQIYKTPPIKDFGGFNFSQILPDPSKPSKRSFIEDLL |
| | | FNKVTLADAGFIKQYGDCLGDIAARDLICAQKFNGLTVLPPLLTDEMIAQYTSALLAGTITSGWTFGAGAALQIPFAMQMAYR |
| | | FNGIGVTQNVLYENQKLIANQFNSAIGKIQDSLSSTASALGKLQDVVNQNAQALNTLVKQLSSNFGAISSVLNDILSRLDPPE |
| | | AEVQIDRLITGRLQSLQTYVTQQLIRAAEIRASANLAATKMSECVLGQSKRVDFCGKGYHLMSFPQSAPHGVVFLHVTYVPA |
| | | QEKNFTTAPAICHDGKAHFPREGVFVSNGTHWFVTQRNFYEPQIITTDNTFVSGNCDVVIGIVNNTVYDPLQPELDSFKEEL |
| | | DKYFKNHTSPDVDLGDISGINASVVNIQKEIDRLNEVAKNLNESLIDLQELGKYEQYIKWPWYIWLGFIAGLIAIVMVTIMLCC |
| | | MTSCCSCLKGCCSCGSCCKFDEDDSEPVLKGVKLHYT |
| 74 | P63 | MGVKVLFALICIAVAEAKRVQPTESIVRFPNITNLCPFGEVFNATRFASVYAWNRKRISNCVADYSVLYNSASFSTFKCYGVS |
| | | PTKLNDLCFTNVYADSFVIRGDEVRQIAPGQTGKIADYNYKLPDDFTGCVIAWNSNNLDSKVGGNYNYLYRLFRKSNLKPFE |
| | | RDISTEIYQAGSTPCNGVEGFNCYFPLQSYGFQPTNGVGYQPYRVVVLSFELLHAPATVCGPKKSTNLVKNKCVNF |
| 75 | P64 | MFVFLVLLPLVSSQCVNLTTRTQLPPAYTNSFTRGVYYPDKVFRSSVLHSTQDLFLPFFSNVTWFHAIHVSGTNGTKRFDN |
| | | PVLPFNDGVYFASTEKSNIIRGWIFGTTLDSKTQSLLIVNNATNVVIKVCEFQFCNDPFLGVYYHKNNKSWMESEFRVYSSA |
| | | NNCTFEYVSQPFLMDLEGKQGNFKNLREFVFKNIDGYFKIYSKHTPINLVRDLPQGFSALEPLVDLPIGINITRFQTLLALHRS |
| | | YLTPGDSSSGWTAGAAAYYVGYLQPRTFLLKYNENGTITDAVDCALDPLSETKCTLKSFTVEKGIYQTSNFRVQPTESIVRF |
| | | PNITNLCPFGEVFNATRFASVYAWNRKRISNCVADYSVLYNSASFSTFKCYGVSPTKLNDLCFTNVYADSFVIRGDEVRQIA |
| | | PGQTGKIADYNYKLPDDFTGCVIAWNSNNLDSKVGGNYNYLYRLFRKSNLKPFERDISTEIYQAGSTPCNGVEGFNCYFPL |
| | | QSYGFQPTNGVGYQPYRVVVLSFELLHAPATVCGPKKSTNLVKNKCVNFNFNGLTGTGVLTESNKKFLPFQQFGRDIADTT |
| | | DAVRDPQTLEILDITPCSFGGVSVITPGTNTSNQVAVLYQDVNCTEVPVAIHADQLTPTWRVYSTGSNVFQTRAGCLIGAEH |
| | | VNNSYECDIPIGAGICASYQTQTNSPRRARSVASQSIIAYTMSLGAENSVAYSNNSIAIPTNFTISVTTEILPVSMTKTSVDCT |
| | | MYICGDSTECSNLLLQYGSFCTQLNRALTGIAVEQDKNTQEVFAQVKQIYKTPPIKDFGGFNFSQILPDPSKPSKRSFIEDLL |
| | | FNKVTLADAGFIKQYGDCLGDIAARDLICAQKFNGLTVLPPLLTDEMIAQYTSALLAGTITSGWTFGAGAALQIPFAMQMAYR |
| | | FNGIGVTQNVLYENQKLIANQFNSAIGKIQDSLSSTASALGKLQDVVNQNAQALNTLVKQLSSNFGAISSVLNDILSRLDPPE |
| | | AEVQIDRLITGRLQSLQTYVTQQLIRAAEIRASANLAATKMSECVLGQSKRVDFCGKGYHLMSFPQSAPHGVVFLHVTYVPA |
| | | QEKNFTTAPAICHDGKAHFPREGVFVSNGTHWFVTQRNFYEPQIITTDNTFVSGNCDVVIGIVNNTVYDPLQPELDSFKEEL |
| | | DKYFKNHTSPDVDLGDISGINASVVNIQKEIDRLNEVAKNLNESLIDLQELGKYEQYIKWPWYIWLGFIAGLIAIVMVTIMLCC |
| | | MTSCCSCLKGCCSCGSCCKFDEDDSEPVLKGVKLHYT |
| 76 | 2A6200 | MFVFLVLLPLVSSQCVNFTNRTQLPSAYTNSFTRGVYYPDKVFRSSVLHSTQDLFLPFFSNVTWFHAIHVSGTNGTKRFDN |
| | | PVLPFNDGVYFASTEKSNIIRGWIFGTTLDSKTQSLLIVNNATNVVIKVCEFQFCNYPFLGVYYHKNNKSWMESEFRVYSSA |
| | | NNCTFEYVSQPFLMDLEGKQGNFKNLSEFVFKNIDGYFKIYSKHTPINLVRDLPQGFSALEPLVDLPIGINITRFQTLLALHRS |
| | | YLTPGDSSSGWTAGAAAYYVGYLQPRTFLLKYNENGTITDAVDCALDPLSETKCTLKSFTVEKGIYQTSNFRVQPTESIVRF |
| | | PNITNLCPFGEVFNATRFASVYAWNRKRISNCVADYSVLYNSASFSTFKCYGVSPTKLNDLCFTNVYADSFVIRGDEVRQIA |
| | | PGQTGTIADYNYKLPDDFTGCVIAWNSNNLDSKVGGNYNYLYRLFRKSNLKPFERDISTEIYQAGSTPCNGVKGFNCYFPL |
| | | QSYGFQPTYGVGYQPYRVVVLSFELLHAPATVCGPKKSTNLVKNKCVNFNFNGLTGTGVLTESNKKFLPFQQFGRDIADTT |
| | | DAVRDPQTLEILDITPCSFGGVSVITPGTNTSNQVAVLYQGVNCTEVPVAIHADQLTPTWRVYSTGSNVFQTRAGCLIGAEY |
| | | VNNSYECDIPIGAGICASYQTQTNSPRRARSVASQSIIAYTMSLGAENSVAYSNNSIAIPTNFTISVTTEILPVSMTKTSVDCT |
| | | MYICGDSTECSNLLLQYGSFCTQLNRALTGIAVEQDKNTQEVFAQVKQIYKTPPIKDFGGFNFSQILPDPSKPSKRSFIEDLL |
| | | FNKVTLADAGFIKQYGDCLGDIAARDLICAQKFNGLTVLPPLLTDEMIAQYTSALLAGTITSGWTFGAGAALQIPFAMQMAYR |
| | | FNGIGVTQNVLYENQKLIANQFNSAIGKIQDSLSSTASALGKLQDVVNQNAQALNTLVKQLSSNFGAISSVLNDILSRLDPPE |
| | | AEVQIDRLITGRLQSLQTYVTQQLIRAAEIRASANLAAIKMSECVLGQSKRVDFCGKGYHLMSFPQSAPHGVVFLHVTYVPA |
| | | QEKNFTTAPAICHDGKAHFPREGVFVSNGTHWFVTQRNFYEPQIITTDNTFVSGNCDVVIGIVNNTVYDPLQPELDSFKEEL |
| | | DKYFKNHTSPDVDLGDISGINASFVNIQKEIDRLNEVAKNLNESLIDLQELGKYEQYIKWPWYIWLGFIAGLIAIVMVTIMLCCM |
| | | TSCCSCLKGCCSCGSCCKFDEDDSEPVLKGVKLHYT |
| 77 | 2A0620 | MFVFLVLLPLVSSQCVNLTTRTQLPPAYTNSFTRGVYYPDKVFRSSVLHSTQDLFLPFFSNVTWFHAIHVSGTNGTKRFANP |
| | | VLPFNDGVYFASTEKSNIIRGWIFGTTLDSKTQSLLIVNNATNVVIKVCEFQFCNDPFLGVYYHKNNKSWMESEFRVYSSAN |
| | | NCTFEYVSQPFLMDLEGKQGNFKNLREFVFKNIDGYFKIYSKHTPINLVRGLPQGFSALEPLVDLPIGINITRFQTLLALHRSY |
| | | LTPGDSSSGWTAGAAAYYVGYLQPRTFLLKYNENGTITDAVDCALDPLSETKCTLKSFTVEKGIYQTSNFRVQPTESIVRFP |
| | | NITNLCPFGEVFNATRFASVYAWNRKRISNCVADYSVLYNSASFSTFKCYGVSPTKLNDLCFTNVYADSFVIRGDEVRQIAP |
| | | GQTGNIADYNYKLPDDFTGCVIAWNSNNLDSKVGGNYNYLYRLFRKSNLKPFERDISTEIYQAGSTPCNGVKGFNCYFPLQ |
| | | SYGFQPTYGVGYQPYRVVVLSFELLHAPATVCGPKKSTNLVKNKCVNFNFNGLTGTGVLTESNKKFLPFQQFGRDIADTTD |
| | | AVRDPQTLEILDITPCSFGGVSVITPGTNTSNQVAVLYQGVNCTEVPVAIHADQLTPTWRVYSTGSNVFQTRAGCLIGAEHV |
| | | NNSYECDIPIGAGICASYQTQTNSPRRARSVASQSIIAYTMSLGVENSVAYSNNSIAIPTNFTISVTTEILPVSMTKTSVDCTM |
| | | YICGDSTECSNLLLQYGSFCTQLNRALTGIAVEQDKNTQEVFAQVKQIYKTPPIKDFGGFNFSQILPDPSKPSKRSFIEDLLF |
| | | NKVTLADAGFIKQYGDCLGDIAARDLICAQKFNGLTVLPPLLTDEMIAQYTSALLAGTITSGWTFGAGAALQIPFAMQMAYRF |
| | | NGIGVTQNVLYENQKLIANQFNSAIGKIQDSLSSTASALGKLQDVVNQNAQALNTLVKQLSSNFGAISSVLNDILSRLDPPEA |
| | | EVQIDRLITGRLQSLQTYVTQQLIRAAEIRASANLAATKMSECVLGQSKRVDFCGKGYHLMSFPQSAPHGVVFLHVTYVPA |
| | | QEKNFTTAPAICHDGKAHFPREGVFVSNGTHWFVTQRNFYEPQIITTDNTFVSGNCDVVIGIVNNTVYDPLQPELDSFKEEL |
| | | DKYFKNHTSPDVDLGDISGINASVVNIQKEIDRLNEVAKNLNESLIDLQELGKYEQYIKWPWYIWLGFIAGLIAIVMVTIMLCC |
| | | MTSCCSCLKGCCSCGSCCKFDEDDSEPVLKGVKLHYT |
| 78 | 2A3430 | MFVFLVLLPLVSSQCVNLTTRTQLPPAYTNSFTRGVYYPDKVFRSSVLHSTQDLFLPFFSNVTWFHAISGTNGTKRFDNPVL |
| | | PFNDGVYFASTEKSNIIRGWIFGTTLDSKTQSLLIVNNATNVVIKVCEFQFCNDPFLGVYHKNNKSWMESEFRVYSSANNCT |
| | | FEYVSQPFLMDLEGKQGNFKNLREFVFKNIDGYFKIYSKHTPINLVRDLPQGFSALEPLVDLPIGINITRFQTLLALHRSYLTP |
| | | GDSSSGWTAGAAAYYVGYLQPRTFLLKYNENGTITDAVDCALDPLSETKCTLKSFTVEKGIYQTSNFRVQPTESIVRFPNIT |
| | | NLCPFGEVFNATRFASVYAWNRKRISNCVADYSVLYNSASFSTFKCYGVSPTKLNDLCFTNVYADSFVIRGDEVRQIAPGQ |
| | | TGKIADYNYKLPDDFTGCVIAWNSNNLDSKVGGNYNYLYRLFRKSNLKPFERDISTEIYQAGSTPCNGVEGFNCYFPLQSY |
| | | GFQPTYGVGYQPYRVVVLSFELLHAPATVCGPKKSTNLVKNKCVNFNFNGLTGTGVLTESNKKFLPFQQFGRDIDDTTDAV |
| | | RDPQTLEILDITPCSFGGVSVITPGTNTSNQVAVLYQGVNCTEVPVAIHADQLTPTWRVYSTGSNVFQTRAGCLIGAEHVNN |
| | | SYECDIPIGAGICASYQTQTNSHRRARSVASQSIIAYTMSLGAENSVAYSNNSIAIPTNFTISVTTEILPVSMTKTSVDCTMYIC |
| | | GDSTECSNLLLQYGSFCIQLNRALTGIAVEQDKNTQEVFAQVKQIYKTPPIKDFGGFNFSQILPDPSKPSKRSFIEDLLFNKVT |
| | | LADAGFIKQYGDCLGDIAARDLICAQKFNGLTVLPPLLTDEMIAQYTSALLAGTITSGWTFGAGAALQIPFAMQMAYRFNGIG |
| | | VTQNVLYENQKLIANQFNSAIGKIQDSLSSTASALGKLQDVVNQNAQALNTLVKQLSSNFGAISSVLNDILARLDPPEAEVQI |
| | | DRLITGRLQSLQTYVTQQLIRAAEIRASANLAATKMSECVLGQSKRVDFCGKGYHLMSFPQSAPHGVVFLHVTYVPAQEKN |
| | | FTTAPAICHDGKAHFPREGVFVSNGTHWFVTQRNFYEPQIITTHNTFVSGNCDVVIGIVNNTVYDPLQPELDSFKEELDKYF |
| | | KNHTSPDVDLGDISGINASVVNIQKEIDRLNEVAKNLNESLIDLQELGKYEQYIKWPWYIWLGFIAGLIAIVMVTIMLCCMTSC |
| | | CSCLKGCCSCGSCCKFDEDDSEPVLKGVKLHYT |
| 79 | 2A8210 | MGVKVLFALICIAVAEAKRVQPTESIVRFPNITNLCPFGEVFNATRFASVYAWNRKRISNCVADYSVLYNSASFSTFKCYGVS |
| | | PTKLNDLCFTNVYADSFVIRGDEVRQIAPGQTGNIADYNYKLPDDFTGCVIAWNSNNLDSKVGGNYNYLYRLFRKSNLKPF |
| | | ERDISTEIYQAGSTPCNGVKGFNCYFPLQSYGFQPTYGVGYQPYRVVVLSFELLHAPATVCGPKKSTNLVKNKCVNF |
| 80 | 2A9200 | MFVFLVLLPLVSSQCVNFTTRTQLPPAYTNSFTRGVYYPDKVFRSSVLHSTQDLFLPFFSNVTWFHAIHVSGTNGTKRFAN |
| | | PVLPFNDGVYFASTEKSNIIRGWIFGTTLDSKTQSLLIVNNATNVVIKVCEFQFCNDPFLGVYYHKNNKSWMESEFRVYSSA |
| | | NNCTFEYVSQPFLMDLEGKQGNFKNLREFVFKNIDGYFKIYSKHTPINLVRGLPQGFSALEPLVDLPIGINITRFQTLHISYLT |
| | | PGDSSSGWTAGAAAYYVGYLQPRTFLLKYNENGTITDAVDCALDPLSETKCTLKSFTVEKGIYQTSNFRVQPTESIVRFPNI |
| | | TNLCPFGEVFNATRFASVYAWNRKRISNCVADYSVLYNSASFSTFKCYGVSPTKLNDLCFTNVYADSFVIRGDEVRQIAPG |
| | | QTGNIADYNYKLPDDFTGCVIAWNSNNLDSKVGGNYNYLYRLFRKSNLKPFERDISTEIYQAGSTPCNGVKGFNCYFPLQS |
| | | YGFQPTYGVGYQPYRVVVLSFELLHAPATVCGPKKSTNLVKNKCVNFNFNGLTGTGVLTESNKKFLPFQQFGRDIADTTDA |
| | | VRDPQTLEILDITPCSFGGVSVITPGTNTSNQVAVLYQGVNCTEVPVAIHADQLTPTWRVYSTGSNVFQTRAGCLIGAEHVN |
| | | NSYECDIPIGAGICASYQTQTNSPRRARSVASQSIIAYTMSLGVENSVAYSNNSIAIPTNFTISVTTEILPVSMTKTSVDCTMYI |
| | | CGDSTECSNLLLQYGSFCTQLNRALTGIAVEQDKNTQEVFAQVKQIYKTPPIKDFGGFNFSQILPDPSKPSKRSFIEDLLFNK |
| | | VTLADAGFIKQYGDCLGDIAARDLICAQKFNGLTVLPPLLTDEMIAQYTSALLAGTITSGWTFGAGAALQIPFAMQMAYRFNG |
| | | IGVTQNVLYENQKLIANQFNSAIGKIQDSLSSTASALGKLQDVVNQNAQALNTLVKQLSSNFGAISSVLNDILSRLDPPEAEV |
| | | QIDRLITGRLQSLQTYVTQQLIRAAEIRASANLAATKMSECVLGQSKRVDFCGKGYHLMSFPQSAPHGVVFLHVTYVPAQE |
| | | KNFTTAPAICHDGKAHFPREGVFVSNGTHWFVTQRNFYEPQIITTDNTFVSGNCDVVIGIVNNTVYDPLQPELDSFKEELDK |
| | | YFKNHTSPDVDLGDISGINASVVNIQKEIDRLNEVAKNLNESLIDLQELGKYEQYIKWPWYIWLGFIAGLIAIVMVTIMLCCMTS |
| | | CCSCLKGCCSCGSCCKFDEDDSEPVLKGVKLHYT |
| 81 | 2A4361 | MGVKVLFALICIAVAEAKRVQPTESIVRFPNITNLCPFGEVFNATRFASVYAWNRKRISNCVADYSVLYNSASFSTFKCYGVS |
| | | PTKLNDLCFTNVYADSFVIRGDEVRQIAPGQTGKIADYNYKLPDDFTGCVIAWNSNNLDSKVGGNYNYLYRLFRKSNLKPFE |
| | | RDISTEIYQAGSTPCNGVEGENCYFPLQSYGFQPTNGVGYQPYRVVVLSFELLHAPATVCGPKKSTNLVKNKCVNFGSGR |
| | | LRRGSGATNFSLLKQAGDVEENPGPMGVKVLFALICIAVAEAKRVQPTESIVRFPNITNLCPFGEVFNATRFASVYAWNRKR |
| | | ISNCVADYSVLYNSASFSTFKCYGVSPTKLNDLCFTNVYADSFVIRGDEVRQIAPGQTGKIADYNYKLPDDFTGCVIAWNSN |
| | | NLDSKVGGNYNYLYRLFRKSNLKPFERDISTEIYQAGSTPCNGVEGENCYFPLQSYGFQPTNGVGYQPYRVVVLSFELLHA |
| | | PATVCGPKKSTNLVKNKCVNF |
| 82 | 2A5361 | MGVKVLFALICIAVAEAKRVQPTESIVRFPNITNLCPFGEVFNATRFASVYAWNRKRISNCVADYSVLYNSASFSTFKCYGVS |
| | | PTKLNDLCFTNVYADSFVIRGDEVRQIAPGQTGKIADYNYKLPDDFTGCVIAWNSNNLDSKVGGNYNYLYRLFRKSNLKPFE |
| | | RDISTEIYQAGSTPCNGVEGENCYFPLQSYGFQPTNGVGYQPYRVVVLSFELLHAPATVCGPKKSTNLVKNKCVNFGSGR |
| | | LRRGSGATNFSLLKQAGDVEENPGPMGVKVLFALICIAVAEAKRVQPTESIVRFPNITNLCPFGEVFNATRFASVYAWNRKR |
| | | ISNCVADYSVLYNSASFSTFKCYGVSPTKLNDLCFTNVYADSFVIRGDEVRQIAPGQTGKIADYNYKLPDDFTGCVIAWNSN |
| | | NLDSKVGGNYNYLYRLFRKSNLKPFERDISTEIYQAGSTPCNGVEGFNCYFPLQSYGFQPTNGVGYQPYRVVVLSFELLHA |
| | | PATVCGPKKSTNLVKNKCVNFGSGRLRRGSGATNFSLLKQAGDVEENPGPMGVKVLFALICIAVAEAKRVQPTESIVRFPNI |
| | | TNLCPFGEVFNATRFASVYAWNRKRISNCVADYSVLYNSASFSTFKCYGVSPTKLNDLCFTNVYADSFVIRGDEVRQIAPG |
| | | QTGKIADYNYKLPDDFTGCVIAWNSNNLDSKVGGNYNYLYRLFRKSNLKPFERDISTEIYQAGSTPCNGVEGENCYFPLQS |
| | | YGFQPTNGVGYQPYRVVVLSFELLHAPATVCGPKKSTNLVKNKCVNF |
| 83 | 2A3461 | MGVKVLFALICIAVAEAKRVQPTESIVRFPNITNLCPFGEVFNATRFASVYAWNRKRISNCVADYSVLYNSASFSTFKCYGVS |
| | | PTKLNDLCFTNVYADSFVIRGDEVRQIAPGQTGKIADYNYKLPDDFTGCVIAWNSNNLDSKVGGNYNYLYRLFRKSNLKPFE |
| | | RDISTEIYQAGSTPCNGVEGFNCYFPLQSYGFQPTNGVGYQPYRVVVLSFELLHAPATVCGPKKSTNLVKNKCVNFGSGR |
| | | LRRGSGATNFSLLKQAGDVEENPGPRVQPTESIVRFPNITNLCPFGEVFNATRFASVYAWNRKRISNCVADYSVLYNSASF |
| | | STFKCYGVSPTKLNDLCFTNVYADSFVIRGDEVRQIAPGQTGKIADYNYKLPDDFTGCVIAWNSNNLDSKVGGNYNYLYRL |
| | | FRKSNLKPFERDISTEIYQAGSTPCNGVEGFNCYFPLQSYGFQPTNGVGYQPYRVVVLSFELLHAPATVCGPKKSTNLVKN |
| | | KCVNF |
| 84 | 2A4461 | MGVKVLFALICIAVAEAKRVQPTESIVRFPNITNLCPFGEVFNATRFASVYAWNRKRISNCVADYSVLYNSASFSTFKCYGVS |
| | | PTKLNDLCFTNVYADSFVIRGDEVRQIAPGQTGKIADYNYKLPDDFTGCVIAWNSNNLDSKVGGNYNYLYRLFRKSNLKPFE |
| | | RDISTEIYQAGSTPCNGVEGFNCYFPLQSYGFQPTNGVGYQPYRVVVLSFELLHAPATVCGPKKSTNLVKNKCVNFGSGR |
| | | LRRGSGATNFSLLKQAGDVEENPGPRVQPTESIVRFPNITNLCPFGEVFNATRFASVYAWNRKRISNCVADYSVLYNSASF |
| | | STFKCYGVSPTKLNDLCFTNVYADSFVIRGDEVRQIAPGQTGKIADYNYKLPDDFTGCVIAWNSNNLDSKVGGNYNYLYRL |
| | | FRKSNLKPFERDISTEIYQAGSTPCNGVEGFNCYFPLQSYGFQPTNGVGYQPYRVVVLSFELLHAPATVCGPKKSTNLVKN |
| | | KCVNFGSGRLRRGSGATNFSLLKQAGDVEENPGPRVQPTESIVRFPNITNLCPFGEVFNATRFASVYAWNRKRISNCVAD |
| | | YSVLYNSASFSTFKCYGVSPTKLNDLCFTNVYADSFVIRGDEVRQIAPGQTGKIADYNYKLPDDFTGCVIAWNSNNLDSKVG |
| | | GNYNYLYRLFRKSNLKPFERDISTEIYQAGSTPCNGVEGFNCYFPLQSYGFQPTNGVGYQPYRVVVLSFELLHAPATVCGP |
| | | KKSTNLVKNKCVNF |
| 85 | 2A5461 | MGVKVLFALICIAVAEAKRVQPTESIVRFPNITNLCPFGEVFNATRFASVYAWNRKRISNCVADYSVLYNSASFSTFKCYGVS |
| | | PTKLNDLCFTNVYADSFVIRGDEVRQIAPGQTGKIADYNYKLPDDFTGCVIAWNSNNLDSKVGGNYNYLYRLFRKSNLKPFE |
| | | RDISTEIYQAGSTPCNGVEGFNCYFPLQSYGFQPTNGVGYQPYRVVVLSFELLHAPATVCGPKKSTNLVKNKCVNFGSGR |
| | | LRRGSGATNFSLLKQAGDVEENPGPGLEQLESIINFEKLTEWTSGLEQLESIINFEKLTEWTSGLEQLESIINFEKLTEWTS |
| 86 | 2A6461 | MGVKVLFALICIAVAEAKRVQPTESIVRFPNITNLCPFGEVFNATRFASVYAWNRKRISNCVADYSVLYNSASFSTFKCYGVS |
| | | PTKLNDLCFTNVYADSFVIRGDEVRQIAPGQTGKIADYNYKLPDDFTGCVIAWNSNNLDSKVGGNYNYLYRLFRKSNLKPFE |
| | | RDISTEIYQAGSTPCNGVEGFNCYFPLQSYGFQPTNGVGYQPYRVVVLSFELLHAPATVCGPKKSTNLVKNKCVNFRRKR |
| | | RSGSGATNFSLLKQAGDVEENPGPMGVKVLFALICIAVAEAKRVQPTESIVRFPNITNLCPFGEVFNATRFASVYAWNRKRI |
| | | SNCVADYSVLYNSASFSTFKCYGVSPTKLNDLCFTNVYADSFVIRGDEVRQIAPGQTGKIADYNYKLPDDFTGCVIAWNSN |
| | | NLDSKVGGNYNYLYRLFRKSNLKPFERDISTEIYQAGSTPCNGVEGFNCYFPLQSYGFQPTNGVGYQPYRVVVLSFELLHA |
| | | PATVCGPKKSTNLVKNKCVNF |
| 87 | 2A7020 | MFVFLVLLPLVSSQCVNLTTRTQLPPAYTNSFTRGVYYPDKVFRSSVLHSTQDLFLPFFSNVTWFHAIHVSGTNGTKRFDN |
| | | PVLPFNDGVYFASTEKSNIIRGWIFGTTLDSKTQSLLIVNNATNVVIKVCEFQFCNDPFLGVYYHKNNKSWMESEFRVYSSA |
| | | NNCTFEYVSQPFLMDLEGKQGNFKNLREFVFKNIDGYFKIYSKHTPINLVRDLPQGFSALEPLVDLPIGINITRFQTLLALHRS |
| | | YLTPGDSSSGWTAGAAAYYVGYLQPRTFLLKYNENGTITDAVDCALDPLSETKCTLKSFTVEKGIYQTSNFRVQPTESIVRF |
| | | PNITNLCPFGEVFNATRFASVYAWNRKRISNCVADYSVLYNSASFSTFKCYGVSPTKLNDLCFTNVYADSFVIRGDEVRQIA |
| | | PGQTGKIADYNYKLPDDFTGCVIAWNSNNLDSKVGGNYNYLYRLFRKSNLKPFERDISTEIYQAGSTPCNGVEGFNCYFPL |
| | | QSYGFQPTNGVGYQPYRVVVLSFELLHAPATVCGPKKSTNLVKNKCVNFNFNGLTGTGVLTESNKKFLPFQQFGRDIADTT |
| | | DAVRDPQTLEILDITPCSFGGVSVITPGTNTSNQVAVLYQDVNCTEVPVAIHADQLTPTWRVYSTGSNVFQTRAGCLIGAEH |
| | | VNNSYECDIPIGAGICASYQTQTNSPRRARSVASQSIIAYTMSLGAENSVAYSNNSIAIPTNFTISVTTEILPVSMTKTSVDCT |
| | | MYICGDSTECSNLLLQYGSFCTQLNRALTGIAVEQDKNTQEVFAQVKQIYKTPPIKDFGGFNFSQILPDPSKPSKRSFIEDLL |
| | | FNKVTLADAGFIKQYGDCLGDIAARDLICAQKFNGLTVLPPLLTDEMIAQYTSALLAGTITSGWTFGAGAALQIPFAMQMAYR |
| | | FNGIGVTQNVLYENQKLIANQFNSAIGKIQDSLSSTASALGKLQDVVNQNAQALNTLVKQLSSNFGAISSVLNDILSRLDPPE |
| | | AEVQIDRLITGRLQSLQTYVTQQLIRAAEIRASANLAATKMSECVLGQSKRVDFCGKGYHLMSFPQSAPHGVVFLHVTYVPA |
| | | QEKNFTTAPAICHDGKAHFPREGVFVSNGTHWFVTQRNFYEPQIITTDNTFVSGNCDVVIGIVNNTVYDPLQPELDSFKEEL |
| | | DKYFKNHTSPDVDLGDISGINASVVNIQKEIDRLNEVAKNLNESLIDLQELGKYEQYIKWPWYIWLGFIAGLIAIVMVTIMLCC |
| | | MTSCCSCLKGCCSCGSCCKFDEDDSEPVLKGVKLHYT |
| 88 | 2A8620 | MFVFLVLLPLVSSQCVNLTTRTQLPPAYTNSFTRGVYYPDKVFRSSVLHSTQDLFLPFFSNVTWFHAIHVSGTNGTKRFDN |
| | | PVLPFNDGVYFASTEKSNIIRGWIFGTTLDSKTQSLLIVNNATNVVIKVCEFQFCNDPFLGVYYHKNNKSWMESEFRVYSSA |
| | | NNCTFEYVSQPFLMDLEGKQGNFKNLREFVFKNIDGYFKIYSKHTPINLVRDLPQGFSALEPLVDLPIGINITRFQTLLALHRS |
| | | YLTPGDSSSGWTAGAAAYYVGYLQPRTFLLKYNENGTITDAVDCALDPLSETKCTLKSFTVEKGIYQTSNFRVQPTESIVRF |
| | | PNITNLCPFGEVFNATRFASVYAWNRKRISNCVADYSVLYNSASFSTFKCYGVSPTKLNDLCFTNVYADSFVIRGDEVRQIA |
| | | PGQTGKIADYNYKLPDDFTGCVIAWNSNNLDSKVGGNYNYLYRLFRKSNLKPFERDISTEIYQAGSTPCNGVEGFNCYFPL |
| | | QSYGFQPTNGVGYQPYRVVVLSFELLHAPATVCGPKKSTNLVKNKCVNFNFNGLTGTGVLTESNKKFLPFQQFGRDIADTT |
| | | DAVRDPQTLEILDITPCSFGGVSVITPGTNTSNQVAVLYQDVNCTEVPVAIHADQLTPTWRVYSTGSNVFQTRAGCLIGAEH |
| | | VNNSYECDIPIGAGICASYQTQTNSPRRARSVASQSIIAYTMSLGAENSVAYSNNSIAIPTNFTISVTTEILPVSMTKTSVDCT |
| | | MYICGDSTECSNLLLQYGSFCTQLNRALTGIAVEQDKNTQEVFAQVKQIYKTPPIKDFGGFNFSQILPDPSKPSKRSFIEDLL |
| | | FNKVTLADAGFIKQYGDCLGDIAARDLICAQKFNGLTVLPPLLTDEMIAQYTSALLAGTITSGWTFGAGAALQIPFAMQMAYR |
| | | FNGIGVTQNVLYENQKLIANQFN89SAIGKIQDSLSSTASALGKLQDVVNQNAQALNTLVKQLSSNFGAISSVLNDILSRLDPP |
| | | EAEVQIDRLITGRLQSLQTYVTQQLIRAAEIRASANLAATKMSECVLGQSKRVDFCGKGYHLMSFPQSAPHGVVFLHVTYVP |
| | | AQEKNFTTAPAICHDGKAHFPREGVFVSNGTHWFVTQRNFYEPQIITTDNTFVSGNCDVVIGIVNNTVYDPLQPELDSFKEE |
| | | LDKYFKNHTSPDVDLGDISGINASVVNIQKEIDRLNEVAKNLNESLIDLQELGKYEQYIKWPWYIWLGFIAGLIAIVMVTIMLCC |
| | | MTSCCSCLKGCCSCGSCCKFDEDDSEPVLKGVKLHYT |
| 89 | 2A9420 | MFVFLVLLPLVSSQCVNLTTRTQLPPAYTNSFTRGVYYPDKVFRSSVLHSTQDLFLPFFSNVTWFHAIHVSGTNGTKRFDN |
| | | PVLPFNDGVYFASTEKSNIIRGWIFGTTLDSKTQSLLIVNNATNVVIKVCEFQFCNDPFLGVYYHKNNKSWMESEFRVYSSA |
| | | NNCTFEYVSQPFLMDLEGKQGNFKNLREFVFKNIDGYFKIYSKHTPINLVRDLPQGFSALEPLVDLPIGINITRFQTLLALHRS |
| | | YLTPGDSSSGWTAGAAAYYVGYLQPRTFLLKYNENGTITDAVDCALDPLSETKCTLKSFTVEKGIYQTSNFRVQPTESIVRF |
| | | PNITNLCPFGEVFNATRFASVYAWNRKRISNCVADYSVLYNSASFSTFKCYGVSPTKLNDLCFTNVYADSFVIRGDEVRQIA |
| | | PGQTGKIADYNYKLPDDFTGCVIAWNSNNLDSKVGGNYNYLYRLFRKSNLKPFERDISTEIYQAGSTPCNGVEGENCYFPL |
| | | QSYGFQPTNGVGYQPYRVVVLSFELLHAPATVCGPKKSTNLVKNKCVNFNFNGLTGTGVLTESNKKFLPFQQFGRDIADTT |
| | | DAVRDPQTLEILDITPCSFGGVSVITPGTNTSNQVAVLYQDVNCTEVPVAIHADQLTPTWRVYSTGSNVFQTRAGCLIGAEH |
| | | VNNSYECDIPIGAGICASYQTQTNSPRRARSVASQSIIAYTMSLGAENSVAYSNNSIAIPTNFTISVTTEILPVSMTKTSVDCT |
| | | MYICGDSTECSNLLLQYGSFCTQLNRALTGIAVEQDKNTQEVFAQVKQIYKTPPIKDFGGFNFSQILPDPSKPSKRSFIEDLL |
| | | FNKVTLADAGFIKQYGDCLGDIAARDLICAQKFNGLTVLPPLLTDEMIAQYTSALLAGTITSGWTFGAGAALQIPFAMQMAYR |
| | | FNGIGVTQNVLYENQKLIANQFNSAIGKIQDSLSSTASALGKLQDVVNQNAQALNTLVKQLSSNFGAISSVLNDILSRLDPPE |
| | | AEVQIDRLITGRLQSLQTYVTQQLIRAAEIRASANLAATKMSECVLGQSKRVDFCGKGYHLMSFPQSAPHGVVFLHVTYVPA |
| | | QEKNFTTAPAICHDGKAHFPREGVFVSNGTHWFVTQRNFYEPQIITTDNTFVSGNCDVVIGIVNNTVYDPLQPELDSFKEEL |
| | | DKYFKNHTSPDVDLGDISGINASVVNIQKEIDRLNEVAKNLNESLIDLQELGKYEQYIKWPWYIWLGFIAGLIAIVMVTIMLCC |
| | | MTSCCSCLKGCCSCGSCCKFDEDDSEPVLKGVKLHYT |
| 90 | 2A6481 | MFVFLVLLPLVSSQCVNLTTRTQLPPAYTNSFTRGVYYPDKVFRSSVLHSTQDLFLPFFSNVTWFHAIHVSGTNGTKRFDN |
| | | PVLPFNDGVYFASTEKSNIIRGWIFGTTLDSKTQSLLIVNNATNVVIKVCEFQFCNDPFLGVYYHKNNKSWMESEFRVYSSA |
| | | NNCTFEYVSQPFLMDLEGKQGNFKNLREFVFKNIDGYFKIYSKHTPINLVRDLPQGFSALEPLVDLPIGINITRFQTLLALHRS |
| | | YLTPGDSSSGWTAGAAAYYVGYLQPRTFLLKYNENGTITDAVDCALDPLSETKCTLKSFTVEKGIYQTSNFRVQPTESIVRF |
| | | PNITNLCPFGEVFNATRFASVYAWNRKRISNCVADYSVLYNSASFSTFKCYGVSPTKLNDLCFTNVYADSFVIRGDEVRQIA |
| | | PGQTGKIADYNYKLPDDFTGCVIAWNSNNLDSKVGGNYNYLYRLFRKSNLKPFERDISTEIYQAGSTPCNGVEGFNCYFPL |
| | | QSYGFQPTNGVGYQPYRVVVLSFELLHAPATVCGPKKSTNLVKNKCVNFNFNGLTGTGVLTESNKKFLPFQQFGRDIADTT |
| | | DAVRDPQTLEILDITPCSFGGVSVITPGTNTSNQVAVLYQDVNCTEVPVAIHADQLTPTWRVYSTGSNVFQTRAGCLIGAEH |
| | | VNNSYECDIPIGAGICASYQTQTNSPRRARSVASQSIIAYTMSLGAENSVAYSNNSIAIPTNFTISVTTEILPVSMTKTSVDCT |
| | | MYICGDSTECSNLLLQYGSFCTQLNRALTGIAVEQDKNTQEVFAQVKQIYKTPPIKDFGGFNFSQILPDPSKPSKRSFIEDLL |
| | | FNKVTLADAGFIKQYGDCLGDIAARDLICAQKFNGLTVLPPLLTDEMIAQYTSALLAGTITSGWTFGAGAALQIPFAMQMAYR |
| | | FNGIGVTQNVLYENQKLIANQFNSAIGKIQDSLSSTASALGKLQDVVNQNAQALNTLVKQLSSNFGAISSVLNDILSRLDKVE |
| | | AEVQIDRLITGRLQSLQTYVTQQLIRAAEIRASANLAATKMSECVLGQSKRVDFCGKGYHLMSFPQSAPHGVVFLHVTYVPA |
| | | QEKNFTTAPAICHDGKAHFPREGVFVSNGTHWFVTQRNFYEPQIITTDNTFVSGNCDVVIGIVNNTVYDPLQPELDSFKEEL |
| | | DKYFKNHTSPDVDLGDISGINASVVNIQKEIDRLNEVAKNLNESLIDLQELGKYEQYIKWPWYIWLGFIAGLIAIVMVTIMLCC |
| | | MTSCCSCLKGCCSCGSCCKFDEDDSEPVLKGVKLHYT |
| 91 | Spike_ | MAISGVPVLGFFIIAVLMSAQESWAGIISRKPQPKMAQVSSSRRGVYYNDDIFRSDVLHLTQDYFLPFDSNLTQYFSLN |
| | chimera1- | VDSDRYTYFDNPILDFGDGVYFAATEKSNVIRGWIFGSSFDNTTQSAVIVNNSTHIIIRVCNFNLCKEPMYTVSRGTQQ |
| | RBD:SARS- | NAWVYQSAFNCTYDRVEKSFQLDTTPKTGNFKDLREYVFKNRDGFLSVYQTYTAVNLPRGLPTGFSVLKPILKLPFGI |
| | CoV- | NITSYRVVMAMFSQTTSNFLPESAAYYVGNLKYSTFMLRFNENGTITDAVDCSQNPLAELKCTIKNFTVEKGIYQTSN |
| | NTD:HKU3-1- | FRVQPTESIVRFPNITNLCPFGEVFNATKFPSVYAWERKKISNCVADYSVLYNSTFFSTFKCYGVSATKLNDLCFSNVY |
| | S2:SARS- | ADSFVVKGDDVRQIAPGQTGVIADYNYKLPDDFMGCVLAWNTRNIDATSTGNYNYKYRYLRHGKLRPFERDISNVPF |
| | CoV-2 | SPDGKPCTPPALNCYWPLNDYGFYTTTGIGYQPYRVVVLSFELLNAPATVCGPKKSTNLVKNKCVNFNFNGLTGTGV |
| | | LTESNKKFLPFQQFGRDIADTTDAVRDPQTLEILDITPCSFGGVSVITPGTNTSNQVAVLYQDVNCTEVPVAIHADQLT |
| | | PTWRVYSTGSNVFQTRAGCLIGAEHVNNSYECDIPIGAGICASYQTQTNSPRRARSVASQSIIAYTMSLGAENSVAYSN |
| | | NSIAIPTNFTISVTTEILPVSMTKTSVDCTMYICGDSTECSNLLLQYGSFCTQLNRALTGIAVEQDKNTQEVFAQVKQIY |
| | | KTPPIKDFGGFNFSQILPDPSKPSKRSFIEDLLFNKVTLADAGFIKQYGDCLGDIAARDLICAQKFNGLTVLPPLLTDEMI |
| | | AQYTSALLAGTITSGWTFGAGAALQIPFAMQMAYRFNGIGVTQNVLYENQKLIANQFNSAIGKIQDSLSSTASALGKL |
| | | QDVVNQNAQALNTLVKQLSSNFGAISSVLNDILSRLDKVEAEVQIDRLITGRLQSLQTYVTQQLIRAAEIRASANLAAT |
| | | KMSECVLGQSKRVDFCGKGYHLMSFPQSAPHGVVFLHVTYVPAQEKNFTTAPAICHDGKAHFPREGVFVSNGTHWF |
| | | VTQRNFYEPQIITTDNTFVSGNCDVVIGIVNNTVYDPLQPELDSFKEELDKYFKNHTSPDVDLGDISGINASVVNIQKEI |
| | | DRLNEVAKNLNESLIDLQELGKYEQYIKWPWYIWLGFIAGLIAIVMVTIMLCCMTSCCSCLKGCCSCGSCCKFDEDDS |
| | | EPVLKGVKLHYT |
| 92 | Spike_ | MAISGVPVLGFFIIAVLMSAQESWASDLDRCTTFDDVQAPNYTQHTSSMRGVYYPDEIFRSDTLYLTQDLFLPFYSNV |
| | chimera 2- | TGFHTINHTFGNPVIPFKDGIYFAATEKSNVVRGWVFGSTMNNKSQSVIIINNSTNVVIRACNFELCDNPFFAVSKPMGT |
| | RBD:SARS- | QTHTMIFDNAFNCTFEYISDAFSLDVSEKSGNFKHLREFVFKNKDGFLYVYKGYQPIDVVRDLPSGFNTLKPIFKLPLGI |
| | CoV-2- | NITNFRAILTAFSPAQDIWGTSAAAYFVGYLKPTTFMLKYDENGTITDAVDCSQNPLAELKCSVKSFEIDKGIYQTSNF |
| | NTD:SARS- | RVVPSGDVVRFPNITNLCPFGEVFNATRFASVYAWNRKRISNCVADYSVLYNSASFSTFKCYGVSPTKLNDLCFTNVY |
| | CoV, | ADSFVIRGDEVRQIAPGQTGKIADYNYKLPDDFTGCVIAWNSNNLDSKVGGNYNYLYRLFRKSNLKPFERDISTEIYQA |
| | S2:SARS- | GSTPCNGVEGFNCYFPLQSYGFQPTNGVGYQPYRVVVLSFELLHAPATVCGPKLSTDLIKNQCVNFNFNGLTGTGVLT |
| | CoV | PSSKRFQPFQQFGRDVSDFTDSVRDPKTSEILDISPCSFGGVSVITPGTNASSEVAVLYQDVNCTDVSTAIHADQLTPAW |
| | | RIYSTGNNVFQTQAGCLIGAEHVDTSYECDIPIGAGICASYHTVSLLRSTSQKSIVAYTMSLGADSSIAYSNNTIAIPTNF |
| | | SISITTEVMPVSMAKTSVDCNMYICGDSTECANLLLQYGSFCTQLNRALSGIAAEQDRNTREVFAQVKQMYKTPTLKY |
| | | FGGFNFSQILPDPLKPTKRSFIEDLLFNKVTLADAGFMKQYGECLGDINARDLICAQKFNGLTVLPPLLTDDMIAAYTA |
| | | ALVSGTATAGWTFGAGAALQIPFAMQMAYRFNGIGVTQNVLYENQKQIANQFNKAISQIQESLTTTSTALGKLQDVV |
| | | NQNAQALNTLVKQLSSNFGAISSVLNDILSRLDKVEAEVQIDRLITGRLQSLQTYVTQQLIRAAEIRASANLAATKMSE |
| | | CVLGQSKRVDFCGKGYHLMSFPQAAPHGVVFLHVTYVPSQERNFTTAPAICHEGKAYFPREGVFVFNGTSWFITQRNF |
| | | FSPQIITTDNTFVSGNCDVVIGIINNTVYDPLQPELDSFKEELDKYFKNHTSPDVDLGDISGINASVVNIQKEIDRLNEVA |
| | | KNLNESLIDLQELGKYEQYIKWPWYVWLGFIAGLIAIVMVTILLCCMTSCCSCLKGACSCGSCCKFDEDDSEPVLKGV |
| | | KLHYT |
| 93 | Spike_ | MAISGVPVLGFFIIAVLMSAQESWAVNLTTRTQLPPAYTNSFTRGVYYPDKVFRSSVLHSTQDLFLPFFSNVTWFHAIH |
| | chimera 3- | VSGTNGTKRFDNPVLPFNDGVYFASTEKSNIIRGWIFGTTLDSKTQSLLIVNNATNVVIKVCEFQFCNDPFLGVYYHKN |
| | RBD:SARS- | NKSWMESEFRVYSSANNCTFEYVSQPFLMDLEGKQGNFKNLREFVFKNIDGYFKIYSKHTPINLVRDLPQGFSALEPL |
| | CoV- | VDLPIGINITRFQTLLALHRSYLTPGDSSSGWTAGAAAYYVGYLQPRTFLLKYNENGTITDAVDCALDPLSETKCTLKS |
| | NTD:SARS- | FTVEKGIYQTSNFRVQPTESIVRFPNITNLCPFGEVFNATKFPSVYAWERKKISNCVADYSVLYNSTFFSTFKCYGVSAT |
| | CoV2, | KLNDLCFSNVYADSFVVKGDDVRQIAPGQTGVIADYNYKLPDDFMGCVLAWNTRNIDATSTGNYNYKYRYLRHGKL |
| | S2:SARS- | RPFERDISNVPFSPDGKPCTPPALNCYWPLNDYGFYTTTGIGYQPYRVVVLSFELLNAPATVCGPKKSTNLVKNKCVN |
| | CoV2 | FNFNGLTGTGVLTESNKKFLPFQQFGRDIADTTDAVRDPQTLEILDITPCSFGGVSVITPGTNTSNQVAVLYQDVNCTE |
| | | VPVAIHADQLTPTWRVYSTGSNVFQTRAGCLIGAEHVNNSYECDIPIGAGICASYQTQTNSPRRARSVASQSIIAYTMSL |
| | | GAENSVAYSNNSIAIPTNFTISVTTEILPVSMTKTSVDCTMYICGDSTECSNLLLQYGSFCTQLNRALTGIAVEQDKNTQ |
| | | EVFAQVKQIYKTPPIKDFGGFNFSQILPDPSKPSKRSFIEDLLFNKVTLADAGFIKQYGDCLGDIAARDLICAQKENGLT |
| | | VLPPLLTDEMIAQYTSALLAGTITSGWTFGAGAALQIPFAMQMAYRFNGIGVTQNVLYENQKLIANQFNSAIGKIQDS |
| | | LSSTASALGKLQDVVNQNAQALNTLVKQLSSNFGAISSVLNDILSRLDKVEAEVQIDRLITGRLQSLQTYVTQQLIRAA |
| | | EIRASANLAATKMSECVLGQSKRVDFCGKGYHLMSFPQSAPHGVVFLHVTYVPAQEKNFTTAPAICHDGKAHFPREG |
| | | VFVSNGTHWFVTQRNFYEPQIITTDNTFVSGNCDVVIGIVNNTVYDPLQPELDSFKEELDKYFKNHTSPDVDLGDISGI |
| | | NASVVNIQKEIDRLNEVAKNLNESLIDLQELGKYEQYIKWPWYIWLGFIAGLIAIVMVTIMLCCMTSCCSCLKGCCSCG |
| | | SCCKFDEDDSEPVLKGVKLHYT |
| 94 | Spike_ | MAISGVPVLGFFIIAVLMSAQESWAVNLTTRTQLPPAYTNSFTRGVYYPDKVFRSSVLHSTQDLFLPFFSNVTWFHAIH |
| | chimera 4- | VSGTNGTKRFDNPVLPFNDGVYFASTEKSNIIRGWIFGTTLDSKTQSLLIVNNATNVVIKVCEFQFCNDPFLGVYYHKN |
| | RBD: | NKSWMESEFRVYSSANNCTFEYVSQPFLMDLEGKQGNFKNLREFVFKNIDGYFKIYSKHTPINLVRDLPQGFSALEPL |
| | RsSHC014- | VDLPIGINITRFQTLLALHRSYLTPGDSSSGWTAGAAAYYVGYLQPRTFLLKYNENGTITDAVDCALDPLSETKCTLKS |
| | NTD:SARS- | FTVEKGIYQTSNFRVQPTESIVRFPNITNLCPFGEVFNATTFPSVYAWERKRISNCVADYSVLYNSTSFSTFKCYGVSAT |
| | CoV2, | KLNDLCFSNVYADSFVVKGDDVRQIAPGQTGVIADYNYKLPDDFLGCVLAWNTNSKDSSTSGNYNYLYRWVRRSKL |
| | S2:SARS- | NPYERDLSNDIYSPGGQSCSAVGPNCYNPLRPYGFFTTAGVGHQPYRVVVLSFELLNAPATVCGPKKSTNLVKNKCVN |
| | CoV2 | FNFNGLTGTGVLTESNKKFLPFQQFGRDIADTTDAVRDPQTLEILDITPCSFGGVSVITPGTNTSNQVAVLYQDVNCTE |
| | | VPVAIHADQLTPTWRVYSTGSNVFQTRAGCLIGAEHVNNSYECDIPIGAGICASYQTQTNSPRRARSVASQSIIAYTMSL |
| | | GAENSVAYSNNSIAIPTNFTISVTTEILPVSMTKTSVDCTMYICGDSTECSNLLLQYGSFCTQLNRALTGIAVEQDKNTQ |
| | | EVFAQVKQIYKTPPIKDFGGFNFSQILPDPSKPSKRSFIEDLLFNKVTLADAGFIKQYGDCLGDIAARDLICAQKFNGLT |
| | | VLPPLLTDEMIAQYTSALLAGTITSGWTFGAGAALQIPFAMQMAYRFNGIGVTQNVLYENQKLIANQFNSAIGKIQDS |
| | | LSSTASALGKLQDVVNQNAQALNTLVKQLSSNFGAISSVLNDILSRLDKVEAEVQIDRLITGRLQSLQTYVTQQLIRAA |
| | | EIRASANLAATKMSECVLGQSKRVDFCGKGYHLMSFPQSAPHGVVFLHVTYVPAQEKNFTTAPAICHDGKAHFPREG |
| | | VFVSNGTHWFVTQRNFYEPQIITTDNTFVSGNCDVVIGIVNNTVYDPLQPELDSFKEELDKYFKNHTSPDVDLGDISGI |
| | | NASVVNIQKEIDRLNEVAKNLNESLIDLQELGKYEQYIKWPWYIWLGFIAGLIAIVMVTIMLCCMTSCCSCLKGCCSCG |
| | | SCCKFDEDDSEPVLKGVKLHYT |
| 95 | IL2 ss | MYRMQLLSCIALSLALVTNSVNLTTRTQLPPAYTNSFTRGVYYPDKVFRSSVLHSTQDLFLPFFSNVTWFHAIHVSGTNGTK |
| | Spike | RFDNPVLPFNDGVYFASTEKSNIIRGWIFGTTLDSKTQSLLIVNNATNVVIKVCEFQFCNDPFLGVYYHKNNKSWMESEFRV |
| | (highGC)- | YSSANNCTFEYVSQPFLMDLEGKQGNFKNLREFVFKNIDGYFKIYSKHTPINLVRDLPQGFSALEPLVDLPIGINITRFQTLLA |
| | Tri | LHRSYLTPGDSSSGWTAGAAAYYVGYLQPRTFLLKYNENGTITDAVDCALDPLSETKCTLKSFTVEKGIYQTSNFRVQPTE |
| | | SIVRFPNITNLCPFGEVFNATRFASVYAWNRKRISNCVADYSVLYNSASFSTFKCYGVSPTKLNDLCFTNVYADSFVIRGDE |
| | | VRQIAPGQTGKIADYNYKLPDDFTGCVIAWNSNNLDSKVGGNYNYLYRLFRKSNLKPFERDISTEIYQAGSTPCNGVEGEN |
| | | CYFPLQSYGFQPTNGVGYQPYRVVVLSFELLHAPATVCGPKKSTNLVKNKCVNFNFNGLTGTGVLTESNKKFLPFQQFGR |
| | | DIADTTDAVRDPQTLEILDITPCSFGGVSVITPGTNTSNQVAVLYQDVNCTEVPVAIHADQLTPTWRVYSTGSNVFQTRAGC |
| | | LIGAEHVNNSYECDIPIGAGICASYQTQTNSPGSASSVASQSIIAYTMSLGAENSVAYSNNSIAIPTNFTISVTTEILPVSMTKT |
| | | SVDCTMYICGDSTECSNLLLQYGSFCTQLNRALTGIAVEQDKNTQEVFAQVKQIYKTPPIKDFGGFNFSQILPDPSKPSKRS |
| | | FIEDLLFNKVTLADAGFIKQYGDCLGDIAARDLICAQKFNGLTVLPPLLTDEMIAQYTSALLAGTITSGWTFGAGAALQIPFAM |
| | | QMAYRFNGIGVTQNVLYENQKLIANQFNSAIGKIQDSLSSTASALGKLQDVVNQNAQALNTLVKQLSSNFGAISSVLNDILSR |
| | | LDPPEAEVQIDRLITGRLQSLQTYVTQQLIRAAEIRASANLAATKMSECVLGQSKRVDFCGKGYHLMSFPQSAPHGVVFLHV |
| | | TYVPAQEKNFTTAPAICHDGKAHFPREGVFVSNGTHWFVTQRNFYEPQIITTDNTFVSGNCDVVIGIVNNTVYDPLQPELDS |
| | | FKEELDKYFKNHTSPDVDLGDISGINASVVNIQKEIDRLNEVAKNLNESLIDLQELGKYEQGYIPEAPRDGQAYVRKDGEWV |
| | | LLSTFL |
| 96 | II-2 ss | MGVKVLFALICIAVAEAKVNLTTRTQLPPAYTNSFTRGVYYPDKVFRSSVLHSTQDLFLPFFSNVTWFHAIHVSGTNGTKRF |
| | Spike | DNPVLPFNDGVYFASTEKSNIIRGWIFGTTLDSKTQSLLIVNNATNVVIKVCEFQFCNDPFLGVYYHKNNKSWMESEFRVYS |
| | (highGC)- | SANNCTFEYVSQPFLMDLEGKQGNFKNLREFVFKNIDGYFKIYSKHTPINLVRDLPQGFSALEPLVDLPIGINITRFQTLLALH |
| | Tri | RSYLTPGDSSSGWTAGAAAYYVGYLQPRTFLLKYNENGTITDAVDCALDPLSETKCTLKSFTVEKGIYQTSNFRVQPTESIV |
| | | RFPNITNLCPFGEVFNATRFASVYAWNRKRISNCVADYSVLYNSASFSTFKCYGVSPTKLNDLCFTNVYADSFVIRGDEVR |
| | | QIAPGQTGKIADYNYKLPDDFTGCVIAWNSNNLDSKVGGNYNYLYRLFRKSNLKPFERDISTEIYQAGSTPCNGVEGENCY |
| | | FPLQSYGFQPTNGVGYQPYRVVVLSFELLHAPATVCGPKKSTNLVKNKCVNFNFNGLTGTGVLTESNKKFLPFQQFGRDIA |
| | | DTTDAVRDPQTLEILDITPCSFGGVSVITPGTNTSNQVAVLYQDVNCTEVPVAIHADQLTPTWRVYSTGSNVFQTRAGCLIG |
| | | AEHVNNSYECDIPIGAGICASYQTQTNSPGSASSVASQSIIAYTMSLGAENSVAYSNNSIAIPTNFTISVTTEILPVSMTKTSVD |
| | | CTMYICGDSTECSNLLLQYGSFCTQLNRALTGIAVEQDKNTQEVFAQVKQIYKTPPIKDFGGFNFSQILPDPSKPSKRSFIED |
| | | LLFNKVTLADAGFIKQYGDCLGDIAARDLICAQKFNGLTVLPPLLTDEMIAQYTSALLAGTITSGWTFGAGAALQIPFAMQMA |
| | | YRFNGIGVTQNVLYENQKLIANQFNSAIGKIQDSLSSTASALGKLQDVVNQNAQALNTLVKQLSSNFGAISSVLNDILSRLDP |
| | | PEAEVQIDRLITGRLQSLQTYVTQQLIRAAEIRASANLAATKMSECVLGQSKRVDFCGKGYHLMSFPQSAPHGVVFLHVTYV |
| | | PAQEKNFTTAPAICHDGKAHFPREGVFVSNGTHWFVTQRNFYEPQIITTDNTFVSGNCDVVIGIVNNTVYDPLQPELDSFKE |
| | | ELDKYFKNHTSPDVDLGDISGINASVVNIQKEIDRLNEVAKNLNESLIDLQELGKYEQGYIPEAPRDGQAYVRKDGEWVLLST |
| | | FL |
| 97 | Gluc ss | MGVKVLFALICIAVAEAKVNLTTRTQLPPAYTNSFTRGVYYPDKVFRSSVLHSTQDLFLPFFSNVTWFHAIHVSGTNGTKRF |
| | Spike- | DNPVLPFNDGVYFASTEKSNIIRGWIFGTTLDSKTQSLLIVNNATNVVIKVCEFQFCNDPFLGVYYHKNNKSWMESEFRVYS |
| | Tri(lowGC) | SANNCTFEYVSQPFLMDLEGKQGNFKNLREFVFKNIDGYFKIYSKHTPINLVRDLPQGFSALEPLVDLPIGINITRFQTLLALH |
| | | RSYLTPGDSSSGWTAGAAAYYVGYLQPRTFLLKYNENGTITDAVDCALDPLSETKCTLKSFTVEKGIYQTSNFRVQPTESIV |
| | | RFPNITNLCPFGEVFNATRFASVYAWNRKRISNCVADYSVLYNSASFSTFKCYGVSPTKLNDLCFTNVYADSFVIRGDEVR |
| | | QIAPGQTGKIADYNYKLPDDFTGCVIAWNSNNLDSKVGGNYNYLYRLFRKSNLKPFERDISTEIYQAGSTPCNGVEGENCY |
| | | FPLQSYGFQPTNGVGYQPYRVVVLSFELLHAPATVCGPKKSTNLVKNKCVNFNFNGLTGTGVLTESNKKFLPFQQFGRDIA |
| | | DTTDAVRDPQTLEILDITPCSFGGVSVITPGTNTSNQVAVLYQDVNCTEVPVAIHADQLTPTWRVYSTGSNVFQTRAGCLIG |
| | | AEHVNNSYECDIPIGAGICASYQTQTNSPGSASSVASQSIIAYTMSLGAENSVAYSNNSIAIPTNFTISVTTEILPVSMTKTSVD |
| | | CTMYICGDSTECSNLLLQYGSFCTQLNRALTGIAVEQDKNTQEVFAQVKQIYKTPPIKDFGGFNFSQILPDPSKPSKRSFIED |
| | | LLFNKVTLADAGFIKQYGDCLGDIAARDLICAQKFNGLTVLPPLLTDEMIAQYTSALLAGTITSGWTFGAGAALQIPFAMQMA |
| | | YRFNGIGVTQNVLYENQKLIANQFNSAIGKIQDSLSSTASALGKLQDVVNQNAQALNTLVKQLSSNFGAISSVLNDILSRLDP |
| | | PEAEVQIDRLITGRLQSLQTYVTQQLIRAAEIRASANLAATKMSECVLGQSKRVDFCGKGYHLMSFPQSAPHGVVFLHVTYV |
| | | PAQEKNFTTAPAICHDGKAHFPREGVFVSNGTHWFVTQRNFYEPQIITTDNTFVSGNCDVVIGIVNNTVYDPLQPELDSFKE |
| | | ELDKYFKNHTSPDVDLGDISGINASVVNIQKEIDRLNEVAKNLNESLIDLQELGKYEQYIKWPWYIWLGFIAGLIAIVMVTIMLC |
| | | CMTSCCSCLKGCCSCGSCCKFDEDDSEPVLKGVKLHYT |
| 98 | WT ss | MGVKVLFALICIAVAEAKRVQPTESIVRFPNITNLCPFGEVFNATRFASVYAWNRKRISNCVADYSVLYNSASFSTFKCYGVS |
| | RBD *- | PTKLNDLCFTNVYADSFVIRGDEVRQIAPGQTGKIADYNYKLPDDFTGCVIAWNSNNLDSKVGGNYNYLYRLFRKSNLKPFE |
| | Tri(lowGC) | RDISTEIYQAGSTPCNGVEGFNCYFPLQSYGFQPTNGVGYQPYRVVVLSFELLHAPATVCGPKKSTNLVKNKCVNFGYIPE |
| | | APRDGQAYVRKDGEWVLLSTFL |
| 99 | Gluc RBD*- | MFVFLVLLPLVSSQCVNLTTRTQLPPAYTNSFTRGVYYPDKVFRSSVLHSTQDLFLPFFSNVTWFHAIHVSGTNGTKRFDN |
| | Tri(lowGC) | PVLPFNDGVYFASTEKSNIIRGWIFGTTLDSKTQSLLIVNNATNVVIKVCEFQFCNDPFLGVYYHKNNKSWMESEFRVYSSA |
| | | NNCTFEYVSQPFLMDLEGKQGNFKNLREFVFKNIDGYFKIYSKHTPINLVRDLPQGFSALEPLVDLPIGINITRFQTLLALHRS |
| | | YLTPGDSSSGWTAGAAAYYVGYLQPRTFLLKYNENGTITDAVDCALDPLSETKCTLKSFTVEKGIYQTSNFRVQPTESIVRF |
| | | PNITNLCPFGEVFNATRFASVYAWNRKRISNCVADYSVLYNSASFSTFKCYGVSPTKLNDLCFTNVYADSFVIRGDEVRQIA |
| | | PGQTGKIADYNYKLPDDFTGCVIAWNSNNLDSKVGGNYNYLYRLFRKSNLKPFERDISTEIYQAGSTPCNGVEGENCYFPL |
| | | QSYGFQPTNGVGYQPYRVVVLSFELLHAPATVCGPKKSTNLVKNKCVNFNFNGLTGTGVLTESNKKFLPFQQFGRDIADTT |
| | | DAVRDPQTLEILDITPCSFGGVSVITPGTNTSNQVAVLYQGVNCTEVPVAIHADQLTPTWRVYSTGSNVFQTRAGCLIGAEH |
| | | VNNSYECDIPIGAGICASYQTQTNSPGSASSVASQSIIAYTMSLGAENSVAYSNNSIAIPTNFTISVTTEILPVSMTKTSVDCT |
| | | MYICGDSTECSNLLLQYGSFCTQLNRALTGIAVEQDKNTQEVFAQVKQIYKTPPIKDFGGFNFSQILPDPSKPSKRSFIEDLL |
| | | FNKVTLADAGFIKQYGDCLGDIAARDLICAQKFNGLTVLPPLLTDEMIAQYTSALLAGTITSGWTFGAGAALQIPFAMQMAYR |
| | | FNGIGVTQNVLYENQKLIANQFNSAIGKIQDSLSSTASALGKLQDVVNQNAQALNTLVKQLSSNFGAISSVLNDILSRLDPPE |
| | | AEVQIDRLITGRLQSLQTYVTQQLIRAAEIRASANLAATKMSECVLGQSKRVDFCGKGYHLMSFPQSAPHGVVFLHVTYVPA |
| | | QEKNFTTAPAICHDGKAHFPREGVFVSNGTHWFVTQRNFYEPQIITTDNTFVSGNCDVVIGIVNNTVYDPLQPELDSFKEEL |
| | | DKYFKNHTSPDVDLGDISGINASVVNIQKEIDRLNEVAKNLNESLIDLQELGKYEQYIKWPWYIWLGFIAGLIAIVMVTIMLCC |
| | | MTSCCSCLKGCCSCGSCCKFDEDDSEPVLKGVKLHYT |
| 100 | 2A2361 | MGVKVLFALICIAVAEAKRVQPTESIVRFPNITNLCPFGEVFNATRFASVYAWNRKRISNCVADYSVLYNSASFSTFKCYGVS |
| | | PTKLNDLCFTNVYADSFVIRGDEVRQIAPGQTGKIADYNYKLPDDFTGCVIAWNSNNLDSKVGGNYNYLYRLFRKSNLKPFE |
| | | RDISTEIYQAGSTPCNGVEGENCYFPLQSYGFQPTNGVGYQPYRVVVLSFELLHAPATVCGPKKSTNLVKNKCVNFGGGG |
| | | SGYIPEAPRDGQAYVRKDGEWVLLSTFL |
| 101 | 2A3361 | MGVKVLFALICIAVAEAKRVQPTESIVRFPNITNLCPFGEVFNATRFASVYAWNRKRISNCVADYSVLYNSASFSTFKCYGVS |
| | | PTKLNDLCFTNVYADSFVIRGDEVRQIAPGQTGKIADYNYKLPDDFTGCVIAWNSNNLDSKVGGNYNYLYRLFRKSNLKPFE |
| | | RDISTEIYQAGSTPCNGVEGFNCYFPLQSYGFQPTNGVGYQPYRVVVLSFELLHAPATVCGPKKSTNLVKNKCVNFGGGG |
| | | SGYIPEAPRDGQAYVRKDGEWVLLSTFLGGGGSRVQPTESIVRFPNITNLCPFGEVFNATRFASVYAWNRKRISNCVADYS |
| | | VLYNSASFSTFKCYGVSPTKLNDLCFTNVYADSFVIRGDEVRQIAPGQTGKIADYNYKLPDDFTGCVIAWNSNNLDSKVGG |
| | | NYNYLYRLFRKSNLKPFERDISTEIYQAGSTPCNGVEGENCYFPLQSYGFQPTNGVGYQPYRVVVLSFELLHAPATVCGPK |
| | | KSTNLVKNKCVNF |
| 102 | 2A6361 | MGVKVLFALICIAVAEAKRVQPTESIVRFPNITNLCPFGEVFNATRFASVYAWNRKRISNCVADYSVLYNSASFSTFKCYGVS |
| | | PTKLNDLCFTNVYADSFVIRGDEVRQIAPGQTGKIADYNYKLPDDFTGCVIAWNSNNLDSKVGGNYNYLYRLFRKSNLKPFE |
| | | RDISTEIYQAGSTPCNGVEGFNCYFPLQSYGFQPTNGVGYQPYRVVVLSFELLHAPATVCGPKKSTNLVKNKCVNFDIIKLL |
| | | NEQVNKEMNSSNLYMSMSSWCYTHSLDGAGLFLFDHAAEEYEHAKKLIVFLNENNVPVQLTSISAPEHKFESLTQIFQKAY |
| | | EHEQHISESINNIVDHAIKGKDHATFNFLQWYVSEQHEEEVLFKDILDKIELIGNENHGLYLADQYVKGIAKSRKS |
| 103 | 2A7361 | MGVKVLFALICIAVAEAKRVQPTESIVRFPNITNLCPFGEVFNATRFASVYAWNRKRISNCVADYSVLYNSASFSTFKCYGVS |
| | | PTKLNDLCFTNVYADSFVIRGDEVRQIAPGQTGKIADYNYKLPDDFTGCVIAWNSNNLDSKVGGNYNYLYRLFRKSNLKPFE |
| | | RDISTEIYQAGSTPCNGVEGFNCYFPLQSYGFQPTNGVGYQPYRVVVLSFELLHAPATVCGPKKSTNLVKNKCVNFGGGG |
| | | SDIIKLLNEQVNKEMNSSNLYMSMSSWCYTHSLDGAGLFLFDHAAEEYEHAKKLIVFLNENNVPVQLTSISAPEHKFESLTQI |
| | | FQKAYEHEQHISESINNIVDHAIKGKDHATFNFLQWYVSEQHEEEVLFKDILDKIELIGNENHGLYLADQYVKGIAKSRKS |
| 104 | 2A8361 | MGVKVLFALICIAVAEAKRVQPTESIVRFPNITNLCPFGEVFNATRFASVYAWNRKRISNCVADYSVLYNSASFSTFKCYGVS |
| | | PTKLNDLCFTNVYADSFVIRGDEVRQIAPGQTGKIADYNYKLPDDFTGCVIAWNSNNLDSKVGGNYNYLYRLFRKSNLKPFE |
| | | RDISTEIYQAGSTPCNGVEGENCYFPLQSYGFQPTNGVGYQPYRVVVLSFELLHAPATVCGPKKSTNLVKNKCVNFPGSG |
| | | YIPEAPRDGQAYVRKDGEWVLLSTFLSGRSGGDIIKLLNEQVNKEMNSSNLYMSMSSWCYTHSLDGAGLFLFDHAAEEYE |
| | | HAKKLIVFLNENNVPVQLTSISAPEHKFESLTQIFQKAYEHEQHISESINNIVDHAIKGKDHATFNFLQWYVSEQHEEEVLFKD |
| | | ILDKIELIGNENHGLYLADQYVKGIAKSRKS |
| 105 | 2A9361 | MGVKVLFALICIAVAEAKRVQPTESIVRFPNITNLCPFGEVFNATRFASVYAWNRKRISNCVADYSVLYNSASFSTFKCYGVS |
| | | PTKLNDLCFTNVYADSFVIRGDEVRQIAPGQTGKIADYNYKLPDDFTGCVIAWNSNNLDSKVGGNYNYLYRLFRKSNLKPFE |
| | | RDISTEIYQAGSTPCNGVEGFNCYFPLQSYGFQPTNGVGYQPYRVVVLSFELLHAPATVCGPKKSTNLVKNKCVNFINHVG |
| | | GTGGAIMAPVAVTRQLVGS |
| 106 | 2A0461 | MGVKVLFALICIAVAEAKRVQPTESIVRFPNITNLCPFGEVFNATRFASVYAWNRKRISNCVADYSVLYNSASFSTFKCYGVS |
| | | PTKLNDLCFTNVYADSFVIRGDEVRQIAPGQTGKIADYNYKLPDDFTGCVIAWNSNNLDSKVGGNYNYLYRLFRKSNLKPFE |
| | | RDISTEIYQAGSTPCNGVEGFNCYFPLQSYGFQPTNGVGYQPYRVVVLSFELLHAPATVCGPKKSTNLVKNKCVNFGGGG |
| | | SINHVGGTGGAIMAPVAVTRQLVGS |
| 107 | 2A1461 | MGVKVLFALICIAVAEAKINHVGGTGGAIMAPVAVTRQLVGSRVQPTESIVRFPNITNLCPFGEVFNATRFASVYAWNRKRIS |
| | | NCVADYSVLYNSASFSTFKCYGVSPTKLNDLCFTNVYADSFVIRGDEVRQIAPGQTGKIADYNYKLPDDFTGCVIAWNSNNL |
| | | DSKVGGNYNYLYRLFRKSNLKPFERDISTEIYQAGSTPCNGVEGENCYFPLQSYGFQPTNGVGYQPYRVVVLSFELLHAPA |
| | | TVCGPKKSTNLVKNKCVNF |
| 108 | 2A2461 | MGVKVLFALICIAVAEAKINHVGGTGGAIMAPVAVTRQLVGSGGGGSRVQPTESIVRFPNITNLCPFGEVFNATRFASVYAW |
| | | NRKRISNCVADYSVLYNSASFSTFKCYGVSPTKLNDLCFTNVYADSFVIRGDEVRQIAPGQTGKIADYNYKLPDDFTGCVIA |
| | | WNSNNLDSKVGGNYNYLYRLFRKSNLKPFERDISTEIYQAGSTPCNGVEGFNCYFPLQSYGFQPTNGVGYQPYRVVVLSF |
| | | ELLHAPATVCGPKKSTNLVKNKCVNF |
| 109 | | MGVKVLFALICIAVAEAKAKFVAAWTLKAAARVQPTESIVRFPNITNLCPFGEVFNATRFASVYAWNRKRISNCVADYSVLYN |
| | | SASFSTFKCYGVSPTKLNDLCFTNVYADSFVIRGDEVRQIAPGQTGKIADYNYKLPDDFTGCVIAWNSNNLDSKVGGNYNY |
| | | LYRLFRKSNLKPFERDISTEIYQAGSTPCNGVEGENCYFPLQSYGFQPTNGVGYQPYRVVVLSFELLHAPATVCGPKKSTN |
| | | LVKNKCVNF |
| 110 | | MGVKVLFALICIAVAEAKKSSQYIKANSKFIGITE |
| | | RVQPTESIVRFPNITNLCPFGEVFNATRFASVYAWNRKRISNCVADYSVLYNSASFSTFKCYGVSPTKLNDLCFTNVYADSF |
| | | VIRGDEVRQIAPGQTGKIADYNYKLPDDFTGCVIAWNSNNLDSKVGGNYNYLYRLFRKSNLKPFERDISTEIYQAGSTPCNG |
| | | VEGFNCYFPLQSYGFQPTNGVGYQPYRVVVLSFELLHAPATVCGPKKSTNLVKNKCVNF |
| 111 | 2A7520 | MGVKVLFALICIAVAEAKRVQPTESIVRFPNITNLCPFGEVFNATRFASVYAWNRKRISNCVADYSVLYNSASFSTFKCYGVS |
| | | PTKLNDLCFTNVYADSFVIRGDEVRQIAPGQTGKIADYNYKLPDDFTGCVIAWNSNNLDSKVGGNYNYLYRLFRKSNLKPFE |
| | | RDISTEIYQAGSTPCNGVEGFNCYFPLQSYGFQPTNGVGYQPYRVVVLSFELLHAPATVCGPKKSTNLVKNKCVNFGYIPE |
| | | APRDGQAYVRKDGEWVLLSTFL* |
| 112 | P46 | AUGGGCGUGCACGAGUGCCCCGCCUGGCUGUGGCUGCUGCUGAGCCUGCUGAGCCUGCCCCUGGGCCUGCCCG |
| | | UGCUGGGCGCCAGAGUCCAACCAACAGAAUCUAUUGUUAGAUUUCCUAAUAUUACAAACUUGUGCCCUUUUGGUG |
| | | AAGUUUUUAACGCCACCAGAUUUGCAUCCGUGUAUGCUUGGAACAGGAAGAGAAUCAGCAACUGUGUUGCUGAUU |
| | | AUUCUGUCCUAUAUAAUUCCGCAUCAUUUUCCACUUUUAAGUGUUAUGGAGUGUCUCCUACUAAAUUAAAUGAUC |
| | | UCUGCUUUACUAAUGUCUAUGCAGAUUCAUUUGUAAUUAGAGGUGAUGAAGUCAGACAAAUCGCUCCAGGGCAAA |
| | | CUGGAAAGAUUGCUGAUUAUAAUUAUAAAUUACCAGAUGAUUUUACAGGCUGCGUUAUAGCUUGGAAUUCUAACAA |
| | | UCUUGAUUCUAAGGUUGGUGGUAAUUAUAAUUACCUGUAUAGAUUGUUUAGGAAGUCUAAUCUCAAACCUUUUGA |
| | | GAGAGAUAUUUCAACUGAAAUCUAUCAGGCCGGUAGCACACCUUGUAAUGGUGUUGAAGGUUUUAAUUGUUACUU |
| | | UCCUUUACAAUCAUAUGGUUUCCAACCCACUAAUGGUGUUGGUUACCAACCAUACAGAGUAGUAGUACUUUCUUU |
| | | UGAACUUCUACAUGCACCAGCAACUGUUUGUGGACCUAAAAAGUCUACUAAUUUGGUUAAAAACAAAUGUGUCAAU |
| | | UUCUAA |
| 113 | P47 | AUGUACCGGAUGCAGUUGUUGUCCUGUAUAGCUCUUUCCCUUGCAUUGGUCACUAAUUCUAGAGUCCAACCAACA |
| | | GAAUCUAUUGUUAGAUUUCCUAAUAUUACAAACUUGUGCCCUUUUGGUGAAGUUUUUAACGCCACCAGAUUUGCA |
| | | UCCGUGUAUGCUUGGAACAGGAAGAGAAUCAGCAACUGUGUUGCUGAUUAUUCUGUCCUAUAUAAUUCCGCAUCA |
| | | UUUUCCACUUUUAAGUGUUAUGGAGUGUCUCCUACUAAAUUAAAUGAUCUCUGCUUUACUAAUGUCUAUGCAGAU |
| | | UCAUUUGUAAUUAGAGGUGAUGAAGUCAGACAAAUCGCUCCAGGGCAAACUGGAAAGAUUGCUGAUUAUAAUUAU |
| | | AAAUUACCAGAUGAUUUUACAGGCUGCGUUAUAGCUUGGAAUUCUAACAAUCUUGAUUCUAAGGUUGGUGGUAAU |
| | | UAUAAUUACCUGUAUAGAUUGUUUAGGAAGUCUAAUCUCAAACCUUUUGAGAGAGAUAUUUCAACUGAAAUCUAUC |
| | | AGGCCGGUAGCACACCUUGUAAUGGUGUUGAAGGUUUUAAUUGUUACUUUCCUUUACAAUCAUAUGGUUUCCAAC |
| | | CCACUAAUGGUGUUGGUUACCAACCAUACAGAGUAGUAGUACUUUCUUUUGAACUUCUACAUGCACCAGCAACUG |
| | | UUUGUGGACCUAAAAAGUCUACUAAUUUGGUUAAAAACAAAUGUGUCAAUUUCUAA |
| 114 | P48 | AUGGGAGUCAAAGUUCUGUUUGCCCUGAUCUGCAUCGCUGUGGCCGAGGCCAAGAGAGUCCAACCAACAGAAUCU |
| | | AUUGUUAGAUUUCCUAAUAUUACAAACUUGUGCCCUUUUGGUGAAGUUUUUAACGCCACCAGAUUUGCAUCCGUG |
| | | UAUGCUUGGAACAGGAAGAGAAUCAGCAACUGUGUUGCUGAUUAUUCUGUCCUAUAUAAUUCCGCAUCAUUUUCC |
| | | ACUUUUAAGUGUUAUGGAGUGUCUCCUACUAAAUUAAAUGAUCUCUGCUUUACUAAUGUCUAUGCAGAUUCAUUU |
| | | GUAAUUAGAGGUGAUGAAGUCAGACAAAUCGCUCCAGGGCAAACUGGAAAGAUUGCUGAUUAUAAUUAUAAAUUAC |
| | | CAGAUGAUUUUACAGGCUGCGUUAUAGCUUGGAAUUCUAACAAUCUUGAUUCUAAGGUUGGUGGUAAUUAUAAUU |
| | | ACCUGUAUAGAUUGUUUAGGAAGUCUAAUCUCAAACCUUUUGAGAGAGAUAUUUCAACUGAAAUCUAUCAGGCCG |
| | | GUAGCACACCUUGUAAUGGUGUUGAAGGUUUUAAUUGUUACUUUCCUUUACAAUCAUAUGGUUUCCAACCCACUA |
| | | AUGGUGUUGGUUACCAACCAUACAGAGUAGUAGUACUUUCUUUUGAACUUCUACAUGCACCAGCAACUGUUUGUG |
| | | GACCUAAAAAGUCUACUAAUUUGGUUAAAAACAAAUGUGUCAAUUUCUAA |
| 115 | P49 | AUGGGCGUGCACGAGUGCCCCGCCUGGCUGUGGCUGCUGCUGAGCCUGCUGAGCCUGCCCCUGGGCCUGCCCG |
| | | UGCUGGGCGCCAGAGUCCAACCAACAGAAUCUAUUGUUAGAUUUCCUAAUAUUACAAACUUGUGCCCUUUUGGUG |
| | | AAGUUUUUAACGCCACCAGAUUUGCAUCCGUGUAUGCUUGGAACAGGAAGAGAAUCAGCAACUGUGUUGCUGAUU |
| | | AUUCUGUCCUAUAUAAUUCCGCAUCAUUUUCCACUUUUAAGUGUUAUGGAGUGUCUCCUACUAAAUUAAAUGAUC |
| | | UCUGCUUUACUAAUGUCUAUGCAGAUUCAUUUGUAAUUAGAGGUGAUGAAGUCAGACAAAUCGCUCCAGGGCAAA |
| | | CUGGAAAGAUUGCUGAUUAUAAUUAUAAAUUACCAGAUGAUUUUACAGGCUGCGUUAUAGCUUGGAAUUCUAACAA |
| | | UCUUGAUUCUAAGGUUGGUGGUAAUUAUAAUUACCUGUAUAGAUUGUUUAGGAAGUCUAAUCUCAAACCUUUUGA |
| | | GAGAGAUAUUUCAACUGAAAUCUAUCAGGCCGGUAGCACACCUUGUAAUGGUGUUGAAGGUUUUAAUUGUUACUU |
| | | UCCUUUACAAUCAUAUGGUUUCCAACCCACUAAUGGUGUUGGUUACCAACCAUACAGAGUAGUAGUACUUUCUUU |
| | | UGAACUUCUACAUGCACCAGCAACUGUUUGUGGACCUAAAAAGUCUACUAAUUUGGUUAAAAACAAAUGUGUCAAU |
| | | UUCUAA |
| 116 | P50 | AUGUACCGGAUGCAGUUGUUGUCCUGUAUAGCUCUUUCCCUUGCAUUGGUCACUAAUUCUAGGGUUCAGCCUAC |
| | | UGAGUCCAUCGUGAGAUUCCCAAACAUCACAAAUCUUUGUCCCUUCGGUGAGGUAUUCAAUGCGACACGAUUUGC |
| | | CUCAGUGUACGCGUGGAAUCGGAAGAGGAUCUCCAAUUGCGUGGCCGACUACUCCGUCUUAUACAACUCAGCUAG |
| | | CUUUUCAACAUUCAAGUGCUAUGGCGUGAGCCCUACCAAGCUCAAUGACCUGUGCUUCACUAAUGUGUAUGCCGA |
| | | CUCUUUUGUCAUUCGCGGCGACGAGGUCCGACAAAUCGCACCGGGCCAAACCGGUAAAAUUGCCGACUACAACUA |
| | | CAAGCUGCCUGACGACUUCACCGGCUGCGUAAUCGCCUGGAACAGCAAUAACCUGGAUAGCAAAGUGGGGGAAA |
| | | CUACAACUACCUGUACCGGCUCUUUAGAAAGUCCAACCUGAAACCAUUCGAGCGCGAUAUCUCGACCGAAAUCUA |
| | | CCAGGCGGGCAGCACCCCCUGUAAUGGUGUAGAAGGGUUCAAUUGUUACUUUCCACUCCAGAGUUAUGGGUUCC |
| | | AGCCGACCAAUGGCGUCGGUUAUCAACCAUAUCGCGUUGUGGUGUUGUCCUUUGAGCUGCUACACGCCCCAGCU |
| | | ACAGUGUGCGGGCCAAAGAAAAGCACAAAUCUUGUCAAGAACAAAUGCGUUAACUUUUAA |
| 117 | P52 | AUGUACCGGAUGCAGUUGUUGUCCUGUAUAGCUCUUUCCCUUGCAUUGGUCACUAAUUCUGUGAACCUCACCACU |
| | | CGCACACAGCUACCUCCCGCGUACACUAAUUCAUUUACCAGGGGCGUCUAUUAUCCUGAUAAGGUGUUCCGGAGU |
| | | UCAGUGUUGCAUAGCACUCAAGACCUGUUCCUGCCCUUCUUCUCCAAUGUCACUUGGUUUCAUGCGAUACAUGUG |
| | | UCUGGUACCAACGGAACGAAGAGAUUUGAUAACCCCGUACUGCCAUUCAAUGAUGGCGUAUACUUUGCUUCGACU |
| | | GAAAAAUCCAACAUCAUCAGGGGCUGGAUUUUUGGUACAACGCUUGAUUCCAAGACCCAGUCCCUCCUUAUUGUG |
| | | AACAAUGCGACCAACGUCGUGAUAAAGGUCUGUGAGUUUCAGUUCUGCAAUGACCCAUUCCUUGGAGUGUAUUAU |
| | | CACAAGAACAACAAAUCGUGGAUGGAGUCAGAGUUUAGGGUGUACAGCAGCGCUAACAACUGUACAUUUGAGUAU |
| | | GUGAGUCAGCCGUUUCUGAUGGAUCUUGAGGGCAAACAGGGCAAUUUUAAGAAUCUCAGAGAAUUUGUGUUCAAG |
| | | AACAUUGAUGGUUACUUUAAGAUCUAUAGCAAACAUACGCCAAUCAACUUGGUUCGUGAUCUGCCACAGGGAUUU |
| | | AGCGCACUGGAACCUCUCGUUGACUUGCCCAUAGGUAUUAACAUCACCAGGUUCCAGACGCUCUUGGCAUUACAC |
| | | CGUAGUUAUCUGACCCCCGGGGACUCCAGUUCCGGAUGGACUGCAGGAGCCGCUGCCUACUAUGUGGGUUACCU |
| | | CCAGCCCAGGACCUUUCUUUUGAAAUAUAACGAGAACGGCACAAUCACUGAUGCUGUGGACUGCGCAUUGGAUCC |
| | | UUUGUCAGAGACUAAGUGCACUCUGAAGUCAUUCACAGUCGAGAAAGGCAUUUACCAGACGUCUAACUUCAGGGU |
| | | UCAGCCUACUGAGUCCAUCGUGAGAUUCCCAAACAUCACAAAUCUUUGUCCCUUCGGUGAGGUAUUCAAUGCGAC |
| | | ACGAUUUGCCUCAGUGUACGCGUGGAAUCGGAAGAGGAUCUCCAAUUGCGUGGCCGACUACUCCGUCUUAUACAA |
| | | CUCAGCUAGCUUUUCAACAUUCAAGUGCUAUGGCGUGAGCCCUACCAAGCUCAAUGACCUGUGCUUCACUAAUGU |
| | | GUAUGCCGACUCUUUUGUCAUUCGCGGCGACGAGGUCCGACAAAUCGCACCGGGCCAAACCGGUAAAAUUGCCG |
| | | ACUACAACUACAAGCUGCCUGACGACUUCACCGGCUGCGUAAUCGCCUGGAACAGCAAUAACCUGGAUAGCAAAG |
| | | UGGGCGGAAACUACAACUACCUGUACCGGCUCUUUAGAAAGUCCAACCUGAAACCAUUCGAGCGCGAUAUCUCGA |
| | | CCGAAAUCUACCAGGGGGGCAGCACCCCCUGUAAUGGUGUAGAAGGGUUCAAUUGUUACUUUCCACUCCAGAGUU |
| | | AUGGGUUCCAGCCGACCAAUGGCGUCGGUUAUCAACCAUAUCGCGUUGUGGUGUUGUCCUUUGAGCUGCUACAC |
| | | GCCCCAGCUACAGUGUGCGGGCCAAAGAAAAGCACAAAUCUUGUCAAGAACAAAUGCGUUAACUUUAAUUUUAAUG |
| | | GACUCACAGGUACAGGAGUCCUGACCGAAUCUAAUAAGAAGUUCCUGCCCUUUCAACAGUUCGGACGAGACAUUG |
| | | CCGACACCACCGAUGCCGUUCGGGACCCACAGACCUUAGAAAUUCUGGAUAUUACUCCAUGUAGUUUUGGGGGAG |
| | | UGUCUGUCAUCACCCCUGGCACUAAUACAUCUAACCAGGUUGCAGUCCUCUACCAGGAUGUGAACUGUACCGAAG |
| | | UGCCGGUCGCUAUUCACGCAGACCAGCUCACUCCUACCUGGGGGUGUACUCCACAGGCUCUAACGUGUUUCAG |
| | | ACACGUGCAGGGUGCCUAAUCGGCGCAGAGCAUGUAAAUAACUCCUAUGAGUGUGAUAUCCCCAUCGGAGCCGG |
| | | GAUCUGCGCUUCCUACCAGACACAAACGAAUAGUCCCGGAUCUGCCUCAAGCGUGGCAUCUCAAUCCAUUAUAGC |
| | | AUAUACGAUGUCCCUUGGAGCUGAAAACAGCGUUGCGUAUUCAAACAAUAGUAUCGCUAUUCCAACCAAUUUUACA |
| | | AUUAGCGUGACCACAGAAAUACUCCCUGUGAGCAUGACCAAGACCAGUGUAGACUGUACUAUGUACAUCUGCGGC |
| | | GACAGUACUGAGUGUAGCAAUCUGCUGCUACAGUAUGGGUCCUUCUGUACUCAGCUUAAUCGGGCUCUCACCGG |
| | | AAUCGCUGUAGAGCAAGAUAAAAACACACAAGAAGUGUUUGCUCAAGUGAAGCAGAUCUAUAAGACACCUCCCAUC |
| | | AAGGAUUUCGGUGGGUUCAACUUUAGCCAGAUUCUGCCCGAUCCGUCUAAACCGUCCAAGCGAAGUUUCAUCGAA |
| | | GACCUGCUUUUCAAUAAGGUCACGCUGGCAGAUGCUGGAUUUAUCAAACAGUACGGCGACUGUCUGGGCGAUAU |
| | | CGCCGCAAGAGACUUGAUAUGCGCCCAAAAGUUUAAUGGGUUAACCGUCCUUCCACCGCUCCUGACAGACGAGAU |
| | | GAUCGCCCAGUAUACAAGUGCCUUAUUAGCUGGGACCAUUACUAGUGGAUGGACAUUUGGCGCCGGGGCUGCUC |
| | | UACAGAUACCCUUCGCCAUGCAGAUGGCUUACCGCUUCAACGGAAUCGGAGUUACCCAGAACGUACUGUACGAAA |
| | | AUCAGAAACUCAUAGCUAAUCAAUUUAACUCUGCCAUCGGGAAGAUUCAGGAUUCCCUGUCGUCUACAGCGUCCG |
| | | CCUUGGGGAAACUGCAAGAUGUAGUGAACCAGAACGCCCAGGCCUUAAAUACUCUGGUCAAGCAGUUAUCUUCAA |
| | | AUUUCGGAGCAAUUAGCUCUGUGUUGAACGAUAUUCUUUCCAGGCUGGACCCUCCAGAAGCCGAAGUGCAAAUAG |
| | | ACCGGCUCAUCACGGGGCGCUUGCAAAGCCUGCAAACCUAUGUCACCCAGCAACUGAUUCGAGCAGCCGAGAUCC |
| | | GGGCCAGUGCUAAUCUGGCCGCCACAAAAAUGAGCGAGUGCGUCCUCGGGCAGAGCAAACGCGUAGACUUCUGC |
| | | GGUAAAGGCUAUCACCUGAUGAGCUUCCCUCAGAGCGCACCCCACGGGGUGGUCUUCCUCCACGUUACCUACGU |
| | | CCCUGCGCAGGAGAAGAACUUCACUACGGCCCCUGCAAUUUGCCACGAUGGCAAGGCCCACUUUCCCAGGGAGG |
| | | GGGUCUUCGUUUCCAACGGGACUCAUUGGUUCGUGACUCAGAGAAAUUUUUAUGAACCUCAGAUCAUUACCACUG |
| | | AUAAUACAUUCGUGUCUGGCAACUGUGAUGUGGUUAUUGGGAUAGUUAAUAAUACGGUAUACGACCCACUCCAGC |
| | | CCGAGCUGGACUCCUUCAAAGAGGAGCUGGACAAGUACUUUAAAAAUCACACCUCACCUGAUGUGGACCUAGGUG |
| | | ACAUAUCUGGCAUAAAUGCUAGCGUGGUUAACAUUCAGAAGGAAAUCGACAGACUCAACGAGGUGGCCAAAAAUC |
| | | UGAACGAGAGUCUGAUCGACCUGCAGGAGUUGGGAAAAUAUGAACAGUACAUCAAAUGGCCAUGGUACAUCUGGC |
| | | UGGGCUUCAUAGCAGGCCUGAUCGCCAUCGUCAUGGUGACUAUUAUGCUGUGCUGCAUGACAUCCUGUUGUAGC |
| | | UGUUUGAAGGGGUGUUGCUCCUGCGGCUCAUGCUGCAAAUUCGACGAGGACGAUUCAGAACCUGUGCUGAAGGG |
| | | AGUGAAGCUGCAUUACACAUAA |
| 118 | P54 | AUGGGAGUCAAAGUUCUGUUUGCCCUGAUCUGCAUCGCUGUGGCCGAGGCCAAGGUUAAUCUUACAACCAGAACU |
| | | CAAUUACCCCCUGCAUACACUAAUUCUUUCACACGUGGUGUUUAUUACCCUGACAAAGUUUUCAGAUCCUCAGUU |
| | | UUACAUUCAACUCAGGACUUGUUCUUACCUUUCUUUUCCAAUGUUACUUGGUUCCAUGCUAUACAUGUCUCUGGG |
| | | ACCAAUGGUACUAAGAGGUUUGAUAACCCUGUCCUACCAUUUAAUGAUGGUGUUUAUUUUGCUUCCACUGAGAAG |
| | | UCUAACAUAAUAAGAGGCUGGAUUUUUGGUACUACUUUAGAUUCGAAGACCCAGUCCCUACUUAUUGUUAAUAAC |
| | | GCUACUAAUGUUGUUAUUAAAGUCUGUGAAUUUCAAUUUUGUAAUGAUCCAUUUUUGGGUGUUUAUUACCACAAA |
| | | AACAACAAAAGUUGGAUGGAAAGUGAGUUCAGAGUUUAUUCUAGUGCGAAUAAUUGCACUUUUGAAUAUGUCUCU |
| | | CAGCCUUUUCUUAUGGACCUUGAAGGAAAACAGGGUAAUUUCAAAAAUCUUAGGGAAUUUGUGUUUAAGAAUAUU |
| | | GAUGGUUAUUUUAAAAUAUAUUCUAAGCACACGCCUAUUAAUUUAGUGCGUGAUCUCCCUCAGGGUUUUUCGGCU |
| | | UUAGAACCAUUGGUAGAUUUGCCAAUAGGUAUUAACAUCACUAGGUUUCAAACUUUACUUGCUUUACAUAGAAGUU |
| | | AUUUGACUCCUGGUGAUUCUUCUUCAGGUUGGACAGCUGGUGCUGCAGCUUAUUAUGUGGGUUAUCUUCAACCU |
| | | AGGACUUUUCUAUUAAAAUAUAAUGAAAAUGGAACCAUUACAGAUGCUGUAGACUGUGCACUUGACCCUCUCUCAG |
| | | AAACAAAGUGUACGUUGAAAUCCUUCACUGUAGAAAAAGGAAUCUAUCAAACUUCUAACUUUAGAGUCCAACCAAC |
| | | AGAAUCUAUUGUUAGAUUUCCUAAUAUUACAAACUUGUGCCCUUUUGGUGAAGUUUUUAACGCCACCAGAUUUGC |
| | | AUCCGUGUAUGCUUGGAACAGGAAGAGAAUCAGCAACUGUGUUGCUGAUUAUUCUGUCCUAUAUAAUUCCGCAUC |
| | | AUUUUCCACUUUUAAGUGUUAUGGAGUGUCUCCUACUAAAUUAAAUGAUCUCUGCUUUACUAAUGUCUAUGCAGA |
| | | UUCAUUUGUAAUUAGAGGUGAUGAAGUCAGACAAAUCGCUCCAGGGCAAACUGGAAAGAUUGCUGAUUAUAAUUA |
| | | UAAAUUACCAGAUGAUUUUACAGGCUGCGUUAUAGCUUGGAAUUCUAACAAUCUUGAUUCUAAGGUUGGUGGUAA |
| | | UUAUAAUUACCUGUAUAGAUUGUUUAGGAAGUCUAAUCUCAAACCUUUUGAGAGAGAUAUUUCAACUGAAAUCUAU |
| | | CAGGCCGGUAGCACACCUUGUAAUGGUGUUGAAGGUUUUAAUUGUUACUUUCCUUUACAAUCAUAUGGUUUCCAA |
| | | CCCACUAAUGGUGUUGGUUACCAACCAUACAGAGUAGUAGUACUUUCUUUUGAACUUCUACAUGCACCAGCAACU |
| | | GUUUGUGGACCUAAAAAGUCUACUAAUUUGGUUAAAAACAAAUGUGUCAAUUUCAACUUCAAUGGUUUAACAGGCA |
| | | CAGGUGUUCUUACUGAGUCUAACAAAAAGUUUCUGCCUUUCCAACAAUUUGGCAGAGACAUUGCUGACACUACUG |
| | | AUGCUGUCCGUGAUCCACAGACACUUGAGAUUCUUGACAUUACACCAUGUUCUUUUGGUGGUGUCAGUGUUAUAA |
| | | CACCAGGAACAAAUACUUCUAACCAGGUUGCUGUUCUUUAUCAGGAUGUUAACUGCACAGAAGUCCCUGUUGCUA |
| | | UUCAUGCAGAUCAACUUACUCCUACUUGGCGUGUUUAUUCUACAGGUUCUAAUGUUUUUCAAACACGUGCAGGCU |
| | | GUUUAAUAGGGGCUGAACAUGUCAACAACUCAUAUGAGUGUGACAUACCCAUUGGUGCAGGUAUAUGCGCUAGUU |
| | | AUCAGACUCAGACUAAUUCUCCUGGCAGCGCCAGCAGUGUAGCUAGUCAAUCCAUCAUUGCCUACACUAUGUCAC |
| | | UUGGUGCAGAAAAUUCAGUUGCUUACUCUAAUAACUCUAUUGCCAUACCCACAAAUUUUACUAUUAGUGUUACCAC |
| | | AGAAAUUCUACCAGUGUCUAUGACCAAGACAUCAGUAGAUUGUACAAUGUACAUUUGUGGUGAUUCAACUGAAUG |
| | | CAGCAAUCUUUUGUUGCAAUAUGGCAGUUUUUGUACACAAUUAAACCGUGCUUUAACUGGAAUAGCUGUUGAACA |
| | | AGACAAAAACACCCAAGAAGUUUUUGCACAAGUCAAACAAAUUUACAAAACACCACCAAUUAAAGAUUUUGGUGGU |
| | | UUUAAUUUUUCACAAAUAUUACCAGAUCCAUCAAAACCAAGCAAGAGGUCAUUUAUUGAAGAUCUACUUUUCAACA |
| | | AAGUGACACUUGCAGAUGCUGGCUUCAUCAAACAAUAUGGUGAUUGCCUUGGUGAUAUUGCUGCUAGGGACCUCA |
| | | UUUGUGCACAAAAGUUUAACGGCCUUACUGUUUUGCCACCUUUGCUCACAGAUGAAAUGAUUGCUCAAUACACUU |
| | | CUGCACUGUUAGCGGGUACAAUCACUUCUGGUUGGACCUUUGGUGCAGGUGCUGCAUUACAAAUACCAUUUGCU |
| | | AUGCAAAUGGCUUAUAGGUUUAAUGGUAUUGGAGUUACACAGAAUGUUCUCUAUGAGAACCAAAAAUUGAUUGCC |
| | | AACCAAUUUAAUAGUGCUAUUGGCAAAAUUCAAGACUCACUUUCUUCCACAGCAAGUGCACUUGGAAAACUUCAAG |
| | | AUGUGGUCAACCAAAAUGCACAAGCUUUAAACACGCUUGUUAAACAACUUAGCUCCAAUUUUGGUGCAAUUUCAAG |
| | | UGUUUUAAAUGAUAUCCUUUCACGUCUUGACCCUCCCGAGGCUGAAGUGCAAAUUGAUAGGUUGAUCACAGGCAG |
| | | ACUUCAAAGUUUGCAGACAUAUGUGACUCAACAAUUAAUUAGAGCUGCAGAAAUCAGAGCUUCUGCUAAUCUUGCU |
| | | GCUACUAAAAUGUCAGAGUGUGUACUUGGACAAUCAAAAAGAGUUGAUUUUUGUGGAAAGGGCUAUCAUCUUAUG |
| | | UCCUUCCCUCAGUCAGCACCUCAUGGUGUAGUCUUCUUGCAUGUGACUUAUGUCCCUGCACAAGAAAAGAACUUC |
| | | ACAACUGCUCCUGCCAUUUGUCAUGAUGGAAAAGCACACUUUCCUCGUGAAGGUGUCUUUGUUUCAAAUGGCACA |
| | | CACUGGUUUGUAACACAAAGGAAUUUUUAUGAACCACAAAUCAUUACUACAGACAACACAUUUGUGUCUGGUAACU |
| | | GUGAUGUUGUAAUAGGAAUUGUCAACAACACAGUUUAUGAUCCUUUGCAACCUGAAUUAGACUCAUUCAAGGAGG |
| | | AGUUAGAUAAAUAUUUUAAGAAUCAUACAUCACCAGAUGUUGAUUUAGGUGACAUCUCUGGCAUUAAUGCUUCAGU |
| | | UGUAAACAUUCAAAAAGAAAUUGACCGCCUCAAUGAGGUUGCCAAGAAUUUAAAUGAAUCUCUCAUCGAUCUCCAA |
| | | GAACUUGGAAAGUAUGAGCAGUAUAUAAAAUGGCCAUGGUACAUUUGGCUAGGUUUUAUAGCUGGCUUGAUUGCC |
| | | AUAGUAAUGGUGACAAUUAUGCUUUGCUGUAUGACCAGUUGCUGUAGUUGUCUCAAGGGCUGUUGUUCUUGUGG |
| | | AUCCUGCUGCAAAUUUGAUGAAGACGACUCUGAGCCAGUGCUCAAAGGAGUCAAAUUACAUUACACA |
| 119 | P56 | AUGUUUGUUUUUCUUGUUUUAUUGCCACUAGUCUCUAGUCAGUGUAGAGUCCAACCAACAGAAUCUAUUGUUAGA |
| | | UUUCCUAAUAUUACAAACUUGUGCCCUUUUGGUGAAGUUUUUAACGCCACCAGAUUUGCAUCCGUGUAUGCUUGG |
| | | AACAGGAAGAGAAUCAGCAACUGUGUUGCUGAUUAUUCUGUCCUAUAUAAUUCCGCAUCAUUUUCCACUUUUAAG |
| | | UGUUAUGGAGUGUCUCCUACUAAAUUAAAUGAUCUCUGCUUUACUAAUGUCUAUGCAGAUUCAUUUGUAAUUAGA |
| | | GGUGAUGAAGUCAGACAAAUCGCUCCAGGGCAAACUGGAAAGAUUGCUGAUUAUAAUUAUAAAUUACCAGAUGAU |
| | | UUUACAGGCUGCGUUAUAGCUUGGAAUUCUAACAAUCUUGAUUCUAAGGUUGGUGGUAAUUAUAAUUACCUGUAU |
| | | AGAUUGUUUAGGAAGUCUAAUCUCAAACCUUUUGAGAGAGAUAUUUCAACUGAAAUCUAUCAGGCCGGUAGCACA |
| | | CCUUGUAAUGGUGUUGAAGGUUUUAAUUGUUACUUUCCUUUACAAUCAUAUGGUUUCCAACCCACUAAUGGUGUU |
| | | GGUUACCAACCAUACAGAGUAGUAGUACUUUCUUUUGAACUUCUACAUGCACCAGCAACUGUUUGUGGACCUAAA |
| | | AAGUCUACUAAUUUGGUUAAAAACAAAUGUGUCAAUUUCGGGUAUAUCCCUGAAGCCCCCAGGGACGGCCAGGCU |
| | | UACGUCAGAAAGGAUGGAGAGUGGGUGCUCUUGAGCACCUUCCUGUAA |
| 120 | P59 | AUGUUUGUUUUUCUUGUUUUAUUGCCACUAGUCUCUAGUCAGUGUGUUAAUCUUACAACCAGAACUCAAUUACCC |
| | | CCUGCAUACACUAAUUCUUUCACACGUGGUGUUUAUUACCCUGACAAAGUUUUCAGAUCCUCAGUUUUACAUUCA |
| | | ACUCAGGAUUUGUUCUUACCUUUCUUUUCCAAUGUUACUUGGUUCCAUGCUAUACAUGUCUCUGGGACCAAUGGU |
| | | ACUAAGAGGUUUGAUAACCCUGUCCUACCAUUUAAUGAUGGUGUUUAUUUUGCUUCCACUGAGAAGUCUAACAUA |
| | | AUAAGAGGCUGGAUCUUUGGUACUACUUUAGAUUCGAAGACCCAGUCCCUACUUAUUGUUAAUAACGCUACUAAU |
| | | GUUGUUAUUAAAGUCUGUGAAUUUCAAUUUUGUAAUGAUCCAUUUUUGGGUGUUUAUUACCACAAAAACAACAAAA |
| | | GUUGGAUGGAAAGUGAGUUCAGAGUUUAUUCUAGUGCGAAUAAUUGCACUUUUGAAUAUGUCUCUCAGCCUUUUC |
| | | UUAUGGACCUUGAAGGAAAACAGGGUAAUUUCAAAAAUCUUAGGGAAUUUGUGUUUAAGAAUAUUGAUGGUUAUU |
| | | UUAAAAUAUAUUCUAAGCACACGCCUAUUAAUUUAGUGCGUGAUCUCCCUCAGGGUUUUUCGGCUUUAGAACCAU |
| | | UGGUAGAUUUGCCAAUAGGUAUUAACAUCACUAGGUUUCAAACUUUACUUGCUUUACAUAGAAGUUAUUUGACUC |
| | | CUGGUGAUUCUUCUUCAGGUUGGACAGCUGGUGCUGCAGCUUAUUAUGUGGGUUAUCUUCAACCUAGGACUUUU |
| | | CUAUUAAAAUAUAAUGAAAAUGGAACCAUUACAGAUGCUGUAGACUGUGCACUUGACCCUCUCUCAGAAACAAAGU |
| | | GUACGUUGAAAUCCUUCACUGUAGAAAAAGGAAUCUAUCAAACUUCUAACUUUAGAGUCCAACCAACAGAAUCUAU |
| | | UGUUAGAUUUCCUAAUAUUACAAACUUGUGCCCUUUUGGUGAAGUUUUUAACGCCACCAGAUUUGCAUCCGUGUA |
| | | UGCUUGGAACAGGAAGAGAAUCAGCAACUGUGUUGCUGAUUAUUCUGUCCUAUAUAAUUCCGCAUCAUUUUCCAC |
| | | UUUUAAGUGUUAUGGAGUGUCUCCUACUAAAUUAAAUGAUCUCUGCUUUACUAAUGUCUAUGCAGAUUCAUUUGU |
| | | AAUUAGAGGUGAUGAAGUCAGACAAAUCGCUCCAGGGCAAACUGGAAAGAUUGCUGAUUAUAAUUAUAAAUUACCA |
| | | GAUGAUUUUACAGGCUGCGUUAUAGCUUGGAAUUCUAACAAUCUUGAUUCUAAGGUUGGUGGUAAUUAUAAUUAC |
| | | CUGUAUAGAUUGUUUAGGAAGUCUAAUCUCAAACCUUUUGAGAGAGAUAUUUCAACUGAAAUCUAUCAGGCCGGU |
| | | AGCACACCUUGUAAUGGUGUUGAAGGUUUUAAUUGUUACUUUCCUUUACAAUCAUAUGGUUUCCAACCCACUAAU |
| | | GGUGUUGGUUACCAACCAUACAGAGUAGUAGUACUUUCUUUUGAACUUCUACAUGCACCAGCAACUGUUUGUGGA |
| | | CCUAAAAAGUCUACUAAUUUGGUUAAAAACAAAUGUGUCAAUUUCAACUUCAAUGGUUUAACAGGCACAGGUGUUC |
| | | UUACUGAGUCUAACAAAAAGUUUCUGCCUUUCCAACAAUUUGGCAGAGACAUUGCUGACACUACUGAUGCUGUCC |
| | | GUGAUCCACAGACACUUGAGAUUCUUGACAUUACACCAUGUUCUUUUGGUGGUGUCAGUGUUAUAACACCAGGAA |
| | | CAAAUACUUCUAACCAGGUUGCUGUUCUUUAUCAGGAUGUUAACUGCACAGAAGUCCCUGUUGCUAUUCAUGCAG |
| | | AUCAACUUACUCCUACUUGGCGUGUUUAUUCUACAGGUUCUAAUGUUUUUCAAACACGUGCAGGCUGUUUAAUAG |
| | | GGGCUGAACAUGUCAACAACUCAUAUGAGUGUGACAUACCCAUUGGUGCAGGUAUAUGCGCUAGUUAUCAGACUC |
| | | AGACUAAUUCUCCUCGGCGGGCACGUAGUGUAGCUAGUCAAUCCAUCAUUGCCUACACUAUGUCACUUGGUGCAG |
| | | AAAAUUCAGUUGCUUACUCUAAUAACUCUAUUGCCAUACCCACAAAUUUUACUAUUAGUGUUACCACAGAAAUUCU |
| | | ACCAGUGUCUAUGACCAAGACAUCAGUAGAUUGUACAAUGUACAUUUGUGGUGAUUCAACUGAAUGCAGCAAUCU |
| | | UUUGUUGCAAUAUGGCAGUUUUUGUACACAAUUAAACCGUGCUUUAACUGGGAUAGCUGUUGAACAAGACAAAAA |
| | | CACCCAAGAAGUUUUUGCACAAGUCAAACAAAUUUACAAAACACCACCAAUUAAAGAUUUUGGUGGUUUUAAUUUU |
| | | UCACAAAUAUUACCAGAUCCAUCAAAACCAAGCAAGAGGUCAUUUAUUGAAGAUCUACUUUUCAACAAAGUGACAC |
| | | UUGCAGAUGCUGGCUUCAUCAAACAAUAUGGUGAUUGCCUUGGUGAUAUUGCUGCUAGGGACCUCAUUUGUGCA |
| | | CAAAAGUUUAACGGCCUUACUGUUUUGCCACCUUUGCUCACAGAUGAAAUGAUUGCUCAAUACACUUCUGCACUG |
| | | UUAGCGGGUACAAUCACUUCUGGUUGGACCUUUGGUGCAGGUGCUGCAUUACAAAUACCAUUUGCUAUGCAAAUG |
| | | GCUUAUAGGUUUAAUGGUAUUGGAGUUACACAGAAUGUUCUCUAUGAGAACCAAAAAUUGAUUGCCAACCAAUUUA |
| | | AUAGUGCCAUUGGCAAAAUUCAAGACUCACUUUCUUCCACAGCAAGUGCACUUGGAAAACUUCAAGAUGUGGUCA |
| | | ACCAAAAUGCACAAGCUUUAAACACGCUUGUUAAACAACUUAGCUCCAAUUUUGGUGCAAUUUCAAGUGUUUUAAA |
| | | UGAUAUCCUUUCACGUCUUGACCCUCCCGAGGCUGAAGUGCAAAUUGAUAGGUUGAUCACAGGCAGACUUCAAAG |
| | | UUUGCAGACAUAUGUGACUCAACAAUUAAUUAGAGCUGCAGAAAUCAGAGCUUCUGCUAAUCUUGCUGCUACUAAA |
| | | AUGUCAGAGUGUGUACUUGGACAAUCAAAAAGAGUUGAUUUUUGUGGAAAGGGCUAUCAUCUUAUGUCCUUCCCU |
| | | CAGUCAGCACCUCAUGGUGUAGUCUUCUUGCAUGUGACUUAUGUCCCUGCACAAGAAAAGAACUUCACAACUGCU |
| | | CCUGCCAUUUGUCAUGAUGGAAAAGCACACUUUCCUCGUGAAGGUGUCUUUGUUUCAAAUGGCACACACUGGUUU |
| | | GUAACACAAAGGAAUUUUUAUGAACCACAAAUCAUUACUACAGACAACACAUUUGUGUCUGGUAACUGUGAUGUUG |
| | | UAAUAGGAAUUGUCAACAACACAGUUUAUGAUCCUUUGCAACCUGAAUUAGACUCAUUCAAGGAGGAGUUAGAUAA |
| | | AUAUUUUAAGAAUCAUACAUCACCAGAUGUUGAUUUAGGUGACAUCUCUGGCAUUAAUGCUUCAGUUGUAAACAUU |
| | | CAAAAAGAAAUUGACCGCCUCAAUGAGGUUGCCAAGAAUUUAAAUGAAUCUCUCAUCGAUCUCCAAGAACUUGGAA |
| | | AGUAUGAGCAGUAUAUAAAAUGGCCAUGGUACAUUUGGCUAGGUUUUAUAGCUGGCUUGAUUGCCAUAGUAAUGG |
| | | UGACAAUUAUGCUUUGCUGUAUGACCAGUUGCUGUAGUUGUCUCAAGGGCUGUUGUUCUUGUGGAUCCUGCUGC |
| | | AAAUUUGAUGAAGACGACUCUGAGCCAGUGCUCAAAGGAGUCAAAUUACAUUACACA |
| 121 | P60 | AUGUUUGUUUUUCUUGUUUUAUUGCCACUAGUCUCUAGUCAGUGUGUUAAUCUUACAACCAGAACUCAAUUACCC |
| | | CCUGCAUACACUAAUUCUUUCACACGUGGUGUUUAUUACCCUGACAAAGUUUUCAGAUCCUCAGUUUUACAUUCA |
| | | ACUCAGGAUUUGUUCUUACCUUUCUUUUCCAAUGUUACUUGGUUCCAUGCUAUACAUGUCUCUGGGACCAAUGGU |
| | | ACUAAGAGGUUUGAUAACCCUGUCCUACCAUUUAAUGAUGGUGUUUAUUUUGCUUCCACUGAGAAGUCUAACAUA |
| | | AUAAGAGGCUGGAUCUUUGGUACUACUUUAGAUUCGAAGACCCAGUCCCUACUUAUUGUUAAUAACGCUACUAAU |
| | | GUUGUUAUUAAAGUCUGUGAAUUUCAAUUUUGUAAUGAUCCAUUUUUGGGUGUUUAUUACCACAAAAACAACAAAA |
| | | GUUGGAUGGAAAGUGAGUUCAGAGUUUAUUCUAGUGCGAAUAAUUGCACUUUUGAAUAUGUCUCUCAGCCUUUUC |
| | | UUAUGGACCUUGAAGGAAAACAGGGUAAUUUCAAAAAUCUUAGGGAAUUUGUGUUUAAGAAUAUUGAUGGUUAUU |
| | | UUAAAAUAUAUUCUAAGCACACGCCUAUUAAUUUAGUGCGUGAUCUCCCUCAGGGUUUUUCGGCUUUAGAACCAU |
| | | UGGUAGAUUUGCCAAUAGGUAUUAACAUCACUAGGUUUCAAACUUUACUUGCUUUACAUAGAAGUUAUUUGACUC |
| | | CUGGUGAUUCUUCUUCAGGUUGGACAGCUGGUGCUGCAGCUUAUUAUGUGGGUUAUCUUCAACCUAGGACUUUU |
| | | CUAUUAAAAUAUAAUGAAAAUGGAACCAUUACAGAUGCUGUAGACUGUGCACUUGACCCUCUCUCAGAAACAAAGU |
| | | GUACGUUGAAAUCCUUCACUGUAGAAAAAGGAAUCUAUCAAACUUCUAACUUUAGAGUCCAACCAACAGAAUCUAU |
| | | UGUUAGAUUUCCUAAUAUUACAAACUUGUGCCCUUUUGGUGAAGUUUUUAACGCCACCAGAUUUGCAUCCGUGUA |
| | | UGCUUGGAACAGGAAGAGAAUCAGCAACUGUGUUGCUGAUUAUUCUGUCCUAUAUAAUUCCGCAUCAUUUUCCAC |
| | | UUUUAAGUGUUAUGGAGUGUCUCCUACUAAAUUAAAUGAUCUCUGCUUUACUAAUGUCUAUGCAGAUUCAUUUGU |
| | | AAUUAGAGGUGAUGAAGUCAGACAAAUCGCUCCAGGGCAAACUGGAAAGAUUGCUGAUUAUAAUUAUAAAUUACCA |
| | | GAUGAUUUUACAGGCUGCGUUAUAGCUUGGAAUUCUAACAAUCUUGAUUCUAAGGUUGGUGGUAAUUAUAAUUAC |
| | | CUGUAUAGAUUGUUUAGGAAGUCUAAUCUCAAACCUUUUGAGAGAGAUAUUUCAACUGAAAUCUAUCAGGCCGGU |
| | | AGCACACCUUGUAAUGGUGUUGAAGGUUUUAAUUGUUACUUUCCUUUACAAUCAUAUGGUUUCCAACCCACUAAU |
| | | GGUGUUGGUUACCAACCAUACAGAGUAGUAGUACUUUCUUUUGAACUUCUACAUGCACCAGCAACUGUUUGUGGA |
| | | CCUAAAAAGUCUACUAAUUUGGUUAAAAACAAAUGUGUCAAUUUCAACUUCAAUGGUUUAACAGGCACAGGUGUUC |
| | | UUACUGAGUCUAACAAAAAGUUUCUGCCUUUCCAACAAUUUGGCAGAGACAUUGCUGACACUACUGAUGCUGUCC |
| | | GUGAUCCACAGACACUUGAGAUUCUUGACAUUACACCAUGUUCUUUUGGUGGUGUCAGUGUUAUAACACCAGGAA |
| | | CAAAUACUUCUAACCAGGUUGCUGUUCUUUAUCAGGGUGUUAACUGCACAGAAGUCCCUGUUGCUAUUCAUGCAG |
| | | AUCAACUUACUCCUACUUGGCGUGUUUAUUCUACAGGUUCUAAUGUUUUUCAAACACGUGCAGGCUGUUUAAUAG |
| | | GGGCUGAACAUGUCAACAACUCAUAUGAGUGUGACAUACCCAUUGGUGCAGGUAUAUGCGCUAGUUAUCAGACUC |
| | | AGACUAAUUCUCCUCGGCGGGCACGUAGUGUAGCUAGUCAAUCCAUCAUUGCCUACACUAUGUCACUUGGUGCAG |
| | | AAAAUUCAGUUGCUUACUCUAAUAACUCUAUUGCCAUACCCACAAAUUUUACUAUUAGUGUUACCACAGAAAUUCU |
| | | ACCAGUGUCUAUGACCAAGACAUCAGUAGAUUGUACAAUGUACAUUUGUGGUGAUUCAACUGAAUGCAGCAAUCU |
| | | UUUGUUGCAAUAUGGCAGUUUUUGUACACAAUUAAACCGUGCUUUAACUGGGAUAGCUGUUGAACAAGACAAAAA |
| | | CACCCAAGAAGUUUUUGCACAAGUCAAACAAAUUUACAAAACACCACCAAUUAAAGAUUUUGGUGGUUUUAAUUUU |
| | | UCACAAAUAUUACCAGAUCCAUCAAAACCAAGCAAGAGGUCAUUUAUUGAAGAUCUACUUUUCAACAAAGUGACAC |
| | | UUGCAGAUGCUGGCUUCAUCAAACAAUAUGGUGAUUGCCUUGGUGAUAUUGCUGCUAGGGACCUCAUUUGUGCA |
| | | CAAAAGUUUAACGGCCUUACUGUUUUGCCACCUUUGCUCACAGAUGAAAUGAUUGCUCAAUACACUUCUGCACUG |
| | | UUAGCGGGUACAAUCACUUCUGGUUGGACCUUUGGUGCAGGUGCUGCAUUACAAAUACCAUUUGCUAUGCAAAUG |
| | | GCUUAUAGGUUUAAUGGUAUUGGAGUUACACAGAAUGUUCUCUAUGAGAACCAAAAAUUGAUUGCCAACCAAUUUA |
| | | AUAGUGCCAUUGGCAAAAUUCAAGACUCACUUUCUUCCACAGCAAGUGCACUUGGAAAACUUCAAGAUGUGGUCA |
| | | ACCAAAAUGCACAAGCUUUAAACACGCUUGUUAAACAACUUAGCUCCAAUUUUGGUGCAAUUUCAAGUGUUUUAAA |
| | | UGAUAUCCUUUCACGUCUUGACCCUCCCGAGGCUGAAGUGCAAAUUGAUAGGUUGAUCACAGGCAGACUUCAAAG |
| | | UUUGCAGACAUAUGUGACUCAACAAUUAAUUAGAGCUGCAGAAAUCAGAGCUUCUGCUAAUCUUGCUGCUACUAAA |
| | | AUGUCAGAGUGUGUACUUGGACAAUCAAAAAGAGUUGAUUUUUGUGGAAAGGGCUAUCAUCUUAUGUCCUUCCCU |
| | | CAGUCAGCACCUCAUGGUGUAGUCUUCUUGCAUGUGACUUAUGUCCCUGCACAAGAAAAGAACUUCACAACUGCU |
| | | CCUGCCAUUUGUCAUGAUGGAAAAGCACACUUUCCUCGUGAAGGUGUCUUUGUUUCAAAUGGCACACACUGGUUU |
| | | GUAACACAAAGGAAUUUUUAUGAACCACAAAUCAUUACUACAGACAACACAUUUGUGUCUGGUAACUGUGAUGUUG |
| | | UAAUAGGAAUUGUCAACAACACAGUUUAUGAUCCUUUGCAACCUGAAUUAGACUCAUUCAAGGAGGAGUUAGAUAA |
| | | AUAUUUUAAGAAUCAUACAUCACCAGAUGUUGAUUUAGGUGACAUCUCUGGCAUUAAUGCUUCAGUUGUAAACAUU |
| | | CAAAAAGAAAUUGACCGCCUCAAUGAGGUUGCCAAGAAUUUAAAUGAAUCUCUCAUCGAUCUCCAAGAACUUGGAA |
| | | AGUAUGAGCAGUAUAUAAAAUGGCCAUGGUACAUUUGGCUAGGUUUUAUAGCUGGCUUGAUUGCCAUAGUAAUGG |
| | | UGACAAUUAUGCUUUGCUGUAUGACCAGUUGCUGUAGUUGUCUCAAGGGCUGUUGUUCUUGUGGAUCCUGCUGC |
| | | AAAUUUGAUGAAGACGACUCUGAGCCAGUGCUCAAAGGAGUCAAAUUACAUUACACA |
| 122 | P6 | AUGUUUGUUUUUCUUGUUUUAUUGCCACUAGUCUCUAGUCAGUGUGUUAAUCUUACAACCAGAACUCAAUUACCC |
| | | CCUGCAUACACUAAUUCUUUCACACGUGGUGUUUAUUACCCUGACAAAGUUUUCAGAUCCUCAGUUUUACAUUCA |
| | | ACUCAGGAUUUGUUCUUACCUUUCUUUUCCAAUGUUACUUGGUUCCAUGCUAUACAUGUCUCUGGGACCAAUGGU |
| | | ACUAAGAGGUUUGAUAACCCUGUCCUACCAUUUAAUGAUGGUGUUUAUUUUGCUUCCACUGAGAAGUCUAACAUA |
| | | AUAAGAGGCUGGAUCUUUGGUACUACUUUAGAUUCGAAGACCCAGUCCCUACUUAUUGUUAAUAACGCUACUAAU |
| | | GUUGUUAUUAAAGUCUGUGAAUUUCAAUUUUGUAAUGAUCCAUUUUUGGGUGUUUAUUACCACAAAAACAACAAAA |
| | | GUUGGAUGGAAAGUGAGUUCAGAGUUUAUUCUAGUGCGAAUAAUUGCACUUUUGAAUAUGUCUCUCAGCCUUUUC |
| | | UUAUGGACCUUGAAGGAAAACAGGGUAAUUUCAAAAAUCUUAGGGAAUUUGUGUUUAAGAAUAUUGAUGGUUAUU |
| | | UUAAAAUAUAUUCUAAGCACACGCCUAUUAAUUUAGUGCGUGAUCUCCCUCAGGGUUUUUCGGCUUUAGAACCAU |
| | | UGGUAGAUUUGCCAAUAGGUAUUAACAUCACUAGGUUUCAAACUUUACUUGCUUUACAUAGAAGUUAUUUGACUC |
| | | CUGGUGAUUCUUCUUCAGGUUGGACAGCUGGUGCUGCAGCUUAUUAUGUGGGUUAUCUUCAACCUAGGACUUUU |
| | | CUAUUAAAAUAUAAUGAAAAUGGAACCAUUACAGAUGCUGUAGACUGUGCACUUGACCCUCUCUCAGAAACAAAGU |
| | | GUACGUUGAAAUCCUUCACUGUAGAAAAAGGAAUCUAUCAAACUUCUAACUUUAGAGUCCAACCAACAGAAUCUAU |
| | | UGUUAGAUUUCCUAAUAUUACAAACUUGUGCCCUUUUGGUGAAGUUUUUAACGCCACCAGAUUUGCAUCCGUGUA |
| | | UGCUUGGAACAGGAAGAGAAUCAGCAACUGUGUUGCUGAUUAUUCUGUCCUAUAUAAUUCCGCAUCAUUUUCCAC |
| | | UUUUAAGUGUUAUGGAGUGUCUCCUACUAAAUUAAAUGAUCUCUGCUUUACUAAUGUCUAUGCAGAUUCAUUUGU |
| | | AAUUAGAGGUGAUGAAGUCAGACAAAUCGCUCCAGGGCAAACUGGAAAGAUUGCUGAUUAUAAUUAUAAAUUACCA |
| | | GAUGAUUUUACAGGCUGCGUUAUAGCUUGGAAUUCUAACAAUCUUGAUUCUAAGGUUGGUGGUAAUUAUAAUUAC |
| | | CUGUAUAGAUUGUUUAGGAAGUCUAAUCUCAAACCUUUUGAGAGAGAUAUUUCAACUGAAAUCUAUCAGGCCGGU |
| | | AGCACACCUUGUAAUGGUGUUGAAGGUUUUAAUUGUUACUUUCCUUUACAAUCAUAUGGUUUCCAACCCACUAAU |
| | | GGUGUUGGUUACCAACCAUACAGAGUAGUAGUACUUUCUUUUGAACUUCUACAUGCACCAGCAACUGUUUGUGGA |
| | | CCUAAAAAGUCUACUAAUUUGGUUAAAAACAAAUGUGUCAAUUUCAACUUCAAUGGUUUAACAGGCACAGGUGUUC |
| | | UUACUGAGUCUAACAAAAAGUUUCUGCCUUUCCAACAAUUUGGCAGAGACAUUGCUGACACUACUGAUGCUGUCC |
| | | GUGAUCCACAGACACUUGAGAUUCUUGACAUUACACCAUGUUCUUUUGGUGGUGUCAGUGUUAUAACACCAGGAA |
| | | CAAAUACUUCUAACCAGGUUGCUGUUCUUUAUCAGGAUGUUAACUGCACAGAAGUCCCUGUUGCUAUUCAUGCAG |
| | | AUCAACUUACUCCUACUUGGCGUGUUUAUUCUACAGGUUCUAAUGUUUUUCAAACACGUGCAGGCUGUUUAAUAG |
| | | GGGCUGAACAUGUCAACAACUCAUAUGAGUGUGACAUACCCAUUGGUGCAGGUAUAUGCGCUAGUUAUCAGACUC |
| | | AGACUAAUUCUCCUCGGGGGCACGUAGUGUAGCUAGUCAAUCCAUCAUUGCCUACACUAUGUCACUUGGUGCAG |
| | | AAAAUUCAGUUGCUUACUCUAAUAACUCUAUUGCCAUACCCACAAAUUUUACUAUUAGUGUUACCACAGAAAUUCU |
| | | ACCAGUGUCUAUGACCAAGACAUCAGUAGAUUGUACAAUGUACAUUUGUGGUGAUUCAACUGAAUGCAGCAAUCU |
| | | UUUGUUGCAAUAUGGCAGUUUUUGUACACAAUUAAACCGUGCUUUAACUGGGAUAGCUGUUGAACAAGACAAAAA |
| | | CACCCAAGAAGUUUUUGCACAAGUCAAACAAAUUUACAAAACACCACCAAUUAAAGAUUUUGGUGGUUUUAAUUUU |
| | | UCACAAAUAUUACCAGAUCCAUCAAAACCAAGCAAGAGGUCAUUUAUUGAAGAUCUACUUUUCAACAAAGUGACAC |
| | | UUGCAGAUGCUGGCUUCAUCAAACAAUAUGGUGAUUGCCUUGGUGAUAUUGCUGCUAGGGACCUCAUUUGUGCA |
| | | CAAAAGUUUAACGGCCUUACUGUUUUGCCACCUUUGCUCACAGAUGAAAUGAUUGCUCAAUACACUUCUGCACUG |
| | | UUAGCGGGUACAAUCACUUCUGGUUGGACCUUUGGUGCAGGUGCUGCAUUACAAAUACCAUUUGCUAUGCAAAUG |
| | | GCUUAUAGGUUUAAUGGUAUUGGAGUUACACAGAAUGUUCUCUAUGAGAACCAAAAAUUGAUUGCCAACCAAUUUA |
| | | AUAGUGCCAUUGGCAAAAUUCAAGACUCACUUUCUUCCACAGCAAGUGCACUUGGAAAACUUCAAGAUGUGGUCA |
| | | ACCAAAAUGCACAAGCUUUAAACACGCUUGUUAAACAACUUAGCUCCAAUUUUGGUGCAAUUUCAAGUGUUUUAAA |
| | | UGAUAUCCUUUCACGUCUUGACCCUCCCGAGGCUGAAGUGCAAAUUGAUAGGUUGAUCACAGGCAGACUUCAAAG |
| | | UUUGCAGACAUAUGUGACUCAACAAUUAAUUAGAGCUGCAGAAAUCAGAGCUUCUGCUAAUCUUGCUGCUACUAAA |
| | | AUGUCAGAGUGUGUACUUGGACAAUCAAAAAGAGUUGAUUUUUGUGGAAAGGGCUAUCAUCUUAUGUCCUUCCCU |
| | | CAGUCAGCACCUCAUGGUGUAGUCUUCUUGCAUGUGACUUAUGUCCCUGCACAAGAAAAGAACUUCACAACUGCU |
| | | CCUGCCAUUUGUCAUGAUGGAAAAGCACACUUUCCUCGUGAAGGUGUCUUUGUUUCAAAUGGCACACACUGGUUU |
| | | GUAACACAAAGGAAUUUUUAUGAACCACAAAUCAUUACUACAGACAACACAUUUGUGUCUGGUAACUGUGAUGUUG |
| | | UAAUAGGAAUUGUCAACAACACAGUUUAUGAUCCUUUGCAACCUGAAUUAGACUCAUUCAAGGAGGAGUUAGAUAA |
| | | AUAUUUUAAGAAUCAUACAUCACCAGAUGUUGAUUUAGGUGACAUCUCUGGCAUUAAUGCUUCAGUUGUAAACAUU |
| | | CAAAAAGAAAUUGACCGCCUCAAUGAGGUUGCCAAGAAUUUAAAUGAAUCUCUCAUCGAUCUCCAAGAACUUGGAA |
| | | AGUAUGAGCAGUAUAUAAAAUGGCCAUGGUACAUUUGGCUAGGUUUUAUAGCUGGCUUGAUUGCCAUAGUAAUGG |
| | | UGACAAUUAUGCUUUGCUGUAUGACCAGUUGCUGUAGUUGUCUCAAGGGCUGUUGUUCUUGUGGAUCCUGCUGC |
| | | AAAUUUGAUGAAGACGACUCUGAGCCAGUGCUCAAAGGAGUCAAAUUACAUUACACA |
| 123 | P63 | AUGGGCGUGCACGAGUGCCCCGCCUGGCUGUGGCUGCUGCUGAGCCUGCUGAGCCUGCCCCUGGGCCUGCCCG |
| | | UGCUGGGCGCCAGAGUCCAACCAACAGAAUCUAUUGUUAGAUUUCCUAAUAUUACAAACUUGUGCCCUUUUGGUG |
| | | AAGUUUUUAACGCCACCAGAUUUGCAUCCGUGUAUGCUUGGAACAGGAAGAGAAUCAGCAACUGUGUUGCUGAUU |
| | | AUUCUGUCCUAUAUAAUUCCGCAUCAUUUUCCACUUUUAAGUGUUAUGGAGUGUCUCCUACUAAAUUAAAUGAUC |
| | | UCUGCUUUACUAAUGUCUAUGCAGAUUCAUUUGUAAUUAGAGGUGAUGAAGUCAGACAAAUCGCUCCAGGGCAAA |
| | | CUGGAAAGAUUGCUGAUUAUAAUUAUAAAUUACCAGAUGAUUUUACAGGCUGCGUUAUAGCUUGGAAUUCUAACAA |
| | | UCUUGAUUCUAAGGUUGGUGGUAAUUAUAAUUACCUGUAUAGAUUGUUUAGGAAGUCUAAUCUCAAACCUUUUGA |
| | | GAGAGAUAUUUCAACUGAAAUCUAUCAGGCCGGUAGCACACCUUGUAAUGGUGUUGAAGGUUUUAAUUGUUACUU |
| | | UCCUUUACAAUCAUAUGGUUUCCAACCCACUAAUGGUGUUGGUUACCAACCAUACAGAGUAGUAGUACUUUCUUU |
| | | UGAACUUCUACAUGCACCAGCAACUGUUUGUGGACCUAAAAAGUCUACUAAUUUGGUUAAAAACAAAUGUGUCAAU |
| | | UUCUAA |
| 124 | P64 | AUGUACCGGAUGCAGUUGUUGUCCUGUAUAGCUCUUUCCCUUGCAUUGGUCACUAAUUCUAGAGUCCAACCAACA |
| | | GAAUCUAUUGUUAGAUUUCCUAAUAUUACAAACUUGUGCCCUUUUGGUGAAGUUUUUAACGCCACCAGAUUUGCA |
| | | UCCGUGUAUGCUUGGAACAGGAAGAGAAUCAGCAACUGUGUUGCUGAUUAUUCUGUCCUAUAUAAUUCCGCAUCA |
| | | UUUUCCACUUUUAAGUGUUAUGGAGUGUCUCCUACUAAAUUAAAUGAUCUCUGCUUUACUAAUGUCUAUGCAGAU |
| | | UCAUUUGUAAUUAGAGGUGAUGAAGUCAGACAAAUCGCUCCAGGGCAAACUGGAAAGAUUGCUGAUUAUAAUUAU |
| | | AAAUUACCAGAUGAUUUUACAGGCUGCGUUAUAGCUUGGAAUUCUAACAAUCUUGAUUCUAAGGUUGGUGGUAAU |
| | | UAUAAUUACCUGUAUAGAUUGUUUAGGAAGUCUAAUCUCAAACCUUUUGAGAGAGAUAUUUCAACUGAAAUCUAUC |
| | | AGGCCGGUAGCACACCUUGUAAUGGUGUUGAAGGUUUUAAUUGUUACUUUCCUUUACAAUCAUAUGGUUUCCAAC |
| | | CCACUAAUGGUGUUGGUUACCAACCAUACAGAGUAGUAGUACUUUCUUUUGAACUUCUACAUGCACCAGCAACUG |
| | | UUUGUGGACCUAAAAAGUCUACUAAUUUGGUUAAAAACAAAUGUGUCAAUUUCUAA |
| 125 | 2A6200 | AUGUUCGUGUUCCUGGUGCUGCUCCCCCUGGUGAGCUCCCAGUGCGUCAACUUUACCAACCGGACCCAGCUGCC |
| | | CAGUGCCUAUACCAACAGCUUCACCCGCGGCGUCUACUACCCCGACAAGGUGUUCCGGAGCAGCGUGCUGCACA |
| | | GCACCCAGGACCUCUUCCUCCCCUUUUUUAGCAACGUGACCUGGUUCCACGCCAUCCACGUGAGUGGCACCAACG |
| | | GCACCAAGCGGUUCGACAACCCUGUGCUCCCCUUCAACGACGGCGUGUACUUCGCUAGCACAGAAAAAAGUAACA |
| | | UCAUUCGGGGCUGGAUCUUCGGCACCACACUCGACAGUAAGACCCAGAGCCUGCUGAUUGUGAAUAACGCCACCA |
| | | ACGUGGUGAUCAAGGUGUGCGAGUUCCAGUUCUGCAACUACCCCUUCCUGGGCGUGUACUACCACAAGAACAACA |
| | | AGAGCUGGAUGGAGAGCGAGUUCCGCGUGUAUAGCUCUGCCAACAACUGCACCUUUGAGUACGUGAGCCAGCCC |
| | | UUCCUGAUGGACCUGGAGGGCAAGCAGGGCAAUUUCAAAAACCUCAGCGAGUUCGUGUUCAAGAACAUCGACGGC |
| | | UACUUCAAGAUCUACAGCAAGCACACCCCCAUCAACCUGGUGCGGGACCUGCCCCAGGGCUUUAGCGCUCUGGAG |
| | | CCCCUGGUGGACCUGCCCAUCGGCAUCAACAUCACCCGCUUCCAAACCCUGUUGGCCCUGCACCGGAGCUACCU |
| | | GACCCCUGGCGAUAGCAGUAGUGGCUGGACAGCCGGAGCCGCCGCCUACUACGUGGGAUACCUGCAGCCCCGGA |
| | | CCUUCCUGCUGAAGUACAACGAGAACGGCACAAUCACAGACGCUGUGGACUGCGCCCUGGACCCCCUGAGCGAAA |
| | | CAAAGUGCACCCUCAAAAGUUUCACCGUGGAGAAGGGCAUCUACCAGACCAGCAACUUCCGGGUGCAGCCCACCG |
| | | AGAGCAUCGUGCGGUUCCCCAACAUCACCAACCUGUGCCCCUUCGGCGAGGUGUUCAACGCCACCCGGUUCGCC |
| | | AGCGUGUACGCCUGGAACCGGAAGCGGAUCAGCAACUGCGUGGCCGACUACAGCGUGCUGUAUAACAGUGCCAG |
| | | CUUCAGCACCUUCAAGUGCUACGGCGUGAGCCCCACCAAGCUGAACGACCUGUGCUUCACCAACGUGUACGCCGA |
| | | UAGCUUUGUGAUCCGGGGCGACGAGGUGCGGCAGAUCGCCCCCGGCCAGACAGGCACAAUUGCCGAUUACAAUU |
| | | ACAAGCUGCCCGACGAUUUCACCGGCUGCGUGAUCGCCUGGAACAGCAACAACCUGGACAGCAAGGUGGGGGA |
| | | AACUACAACUACCUGUACCGGCUGUUCCGCAAAAGUAACCUCAAGCCUUUCGAGCGGGACAUCAGCACCGAGAUC |
| | | UACCAGGCCGGCAGUACCCCUUGCAACGGCGUGAAGGGCUUCAACUGCUACUUCCCCCUGCAGAGCUACGGCUU |
| | | CCAGCCCACCUACGGCGUGGGCUACCAGCCCUACCGGGUGGUGGUUCUGAGCUUCGAGCUGCUGCACGCCCCUG |
| | | CCACCGUGUGCGGCCCCAAGAAAAGCACCAACCUGGUGAAGAACAAGUGCGUGAACUUCAACUUUAACGGACUGA |
| | | CAGGCACCGGCGUGCUGACCGAGAGCAACAAGAAGUUCCUGCCCUUCCAGCAAUUCGGCCGGGAUAUUGCCGAC |
| | | ACCACCGACGCCGUGCGGGACCCCCAGACCCUGGAGAUCCUGGACAUCACACCCUGUAGCUUCGGCGGCGUGAG |
| | | CGUGAUCACCCCCGGCACCAACACCAGCAACCAGGUGGCCGUGCUCUACCAAGGCGUGAACUGCACCGAGGUGC |
| | | CCGUGGCCAUCCACGCCGACCAGCUGACCCCCACCUGGCGGGUGUACAGCACCGGCAGCAACGUGUUCCAGACC |
| | | CGGGCCGGCUGCCUGAUCGGCGCCGAGUACGUGAAUAACAGCUACGAGUGCGACAUCCCCAUCGGAGCCGGAAU |
| | | CUGCGCCAGCUACCAGACCCAGACCAACAGCCCCCGGAGAGCCCGGAGCGUGGCCAGCCAGAGCAUUAUUGCCU |
| | | ACACCAUGAGCCUGGGCGCCGAGAACAGCGUGGCCUACAGCAACAAUAGUAUUGCCAUCCCCACCAACUUCACCA |
| | | UCAGCGUGACCACUGAAAUCCUCCCCGUGAGCAUGACCAAGACCAGCGUGGACUGCACCAUGUACAUCUGCGGCG |
| | | ACAGCACCGAGUGCAGCAACCUGCUCCUGCAGUACGGCAGCUUCUGCACCCAGCUGAACCGGGCCCUGACCGGA |
| | | AUUGCCGUGGAGCAGGACAAGAACACCCAGGAGGUGUUCGCCCAGGUGAAGCAGAUCUACAAGACACCUCCUAUC |
| | | AAGGACUUCGGCGGGUUCAACUUCAGCCAGAUCCUGCCCGACCCCAGCAAGCCCAGCAAGCGGAGCUUCAUCGA |
| | | GGACCUGUUGUUCAACAAGGUGACCCUGGCCGACGCCGGCUUCAUCAAGCAGUACGGCGACUGUCUGGGAGAUA |
| | | UUGCCGCACGGGACCUGAUCUGCGCCCAGAAGUUCAACGGCCUGACCGUGCUGCCUCCUCUGCUGACCGACGAG |
| | | AUGAUCGCCCAGUACACAAGCGCUCUGCUCGCCGGCACCAUCACCAGCGGCUGGACCUUCGGCGCCGGCGCUGC |
| | | CCUGCAGAUCCCCUUCGCCAUGCAGAUGGCCUACCGGUUCAACGGCAUCGGCGUGACCCAGAACGUGCUGUACG |
| | | AGAACCAGAAGCUGAUCGCCAACCAGUUCAACAGCGCCAUCGGCAAGAUCCAGGACAGCCUGAGCUCCACCGCCA |
| | | GCGCCCUGGGCAAGCUGCAGGACGUGGUGAACCAGAACGCCCAGGCCCUGAACACCCUGGUGAAGCAGCUGAGC |
| | | AGCAACUUCGGCGCCAUCAGCUCUGUGCUGAACGACAUCCUGAGCCGGCUGGACCCCCCAGAGGCCGAGGUGCA |
| | | AAUCGAUCGGCUCAUCACCGGCCGGCUGCAGAGCCUGCAGACCUACGUGACACAGCAGCUGAUCCGGGCCGCCG |
| | | AGAUCCGGGCCAGCGCCAACCUGGCCGCUAUCAAGAUGAGCGAGUGCGUGCUGGGCCAGAGCAAGCGGGUGGAC |
| | | UUCUGCGGCAAGGGCUACCACCUGAUGAGCUUCCCCCAGAGCGCCCCCCACGGCGUGGUGUUCCUGCACGUGAC |
| | | CUACGUGCCCGCCCAGGAGAAGAACUUCACCACCGCCCCCGCCAUCUGCCACGACGGCAAGGCCCACUUCCCCCG |
| | | GGAGGGCGUGUUCGUGAGCAACGGCACCCACUGGUUCGUGACCCAGCGGAACUUCUACGAGCCCCAGAUCAUAA |
| | | CCACCGACAACACCUUCGUGAGCGGCAACUGCGACGUGGUCAUCGGCAUCGUGAACAACACCGUGUACGACCCCC |
| | | UGCAGCCCGAGCUGGACAGCUUCAAGGAGGAACUGGACAAGUACUUCAAGAACCACACCAGCCCCGACGUGGACC |
| | | UGGGCGACAUCAGCGGCAUCAACGCCAGCUUCGUGAACAUCCAGAAGGAGAUCGACCGGCUGAACGAGGUGGCC |
| | | AAGAACCUGAACGAGAGCCUGAUCGACCUGCAGGAGCUGGGCAAGUACGAGCAGUACAUCAAGUGGCCCUGGUAC |
| | | AUCUGGCUGGGCUUUAUUGCCGGCCUGAUCGCCAUCGUGAUGGUGACCAUCAUGCUGUGCUGUAUGACAAGCUG |
| | | UUGCAGUUGCCUGAAGGGCUGCUGCAGCUGCGGCAGCUGCUGCAAGUUCGACGAGGACGACAGCGAGCCCGUGC |
| | | UGAAGGGCGUGAAGCUGCACUACACC |
| 126 | 2A0620 | AUGUUCGUGUUCCUGGUGCUGCUCCCCCUGGUGAGCUCCCAGUGCGUCAACCUGACCACACGGACCCAGCUGCC |
| | | CCCCGCCUAUACCAACAGCUUCACCCGCGGCGUCUACUACCCCGACAAGGUGUUCCGGAGCAGCGUGCUGCACA |
| | | GCACCCAGGACCUCUUCCUCCCCUUUUUUAGCAACGUGACCUGGUUCCACGCCAUCCACGUGAGUGGCACCAACG |
| | | GCACCAAGCGGUUCGCCAACCCUGUGCUCCCCUUCAACGACGGCGUGUACUUCGCUAGCACAGAAAAAAGUAACA |
| | | UCAUUCGGGGCUGGAUCUUCGGCACCACACUGGAUAGCAAAACCCAGAGCCUGCUGAUUGUGAAUAACGCCACCA |
| | | ACGUGGUGAUCAAGGUGUGCGAGUUCCAGUUCUGCAACGACCCCUUCCUGGGCGUGUACUACCACAAGAACAACA |
| | | AGAGCUGGAUGGAGAGCGAGUUCCGCGUGUAUAGCUCUGCCAACAACUGCACCUUCGAGUACGUGAGCCAGCCC |
| | | UUCCUGAUGGACCUGGAGGGCAAGCAGGGCAAUUUCAAAAACCUGCGGGAGUUCGUGUUCAAGAACAUCGACGG |
| | | CUACUUCAAGAUCUACAGCAAGCACACCCCCAUCAACCUGGUGCGGGGCCUGCCCCAGGGCUUUAGCGCUCUGG |
| | | AGCCCCUGGUGGACCUGCCCAUCGGCAUCAACAUCACCCGCUUCCAAACCCUGUUGGCCCUGCACCGGAGCUAC |
| | | CUGACCCCUGGCGAUAGCAGUAGUGGCUGGACAGCCGGAGCCGCCGCCUACUACGUGGGAUACCUGCAGCCCCG |
| | | GACCUUCCUGCUGAAGUACAACGAGAACGGCACAAUCACAGACGCCGUGGACUGCGCCCUGGACCCCCUGAGCGA |
| | | AACAAAGUGCACCCUCAAAAGUUUCACCGUGGAGAAGGGCAUCUACCAGACCAGCAACUUCCGGGUGCAGCCCAC |
| | | CGAGAGCAUCGUGCGGUUCCCCAACAUCACCAACCUGUGCCCCUUCGGCGAGGUGUUCAACGCCACCCGGUUCG |
| | | CCAGCGUGUACGCCUGGAACCGGAAGCGGAUCAGCAACUGCGUGGCCGACUACAGCGUGCUGUAUAACAGUGCC |
| | | AGCUUCAGCACCUUCAAGUGCUACGGCGUGAGCCCCACCAAGCUGAACGACCUGUGCUUCACCAACGUGUACGCC |
| | | GACAGCUUCGUGAUCCGGGGCGACGAGGUGCGGCAGAUCGCCCCCGGCCAGACCGGCAAUAUUGCUGACUAUAA |
| | | CUAUAAGCUGCCCGACGAUUUCACCGGCUGCGUGAUCGCCUGGAACAGCAACAACCUGGACAGCAAGGUGGGCG |
| | | GAAACUACAACUACCUGUACCGGCUGUUCCGCAAAAGUAACCUCAAGCCUUUCGAGCGGGACAUCAGCACCGAGA |
| | | UCUACCAGGCCGGCAGUACCCCUUGCAACGGCGUGAAGGGCUUCAACUGCUACUUCCCCCUGCAGAGCUACGGC |
| | | UUCCAGCCCACCUACGGCGUGGGCUACCAGCCCUACCGGGUGGUGGUUCUGAGCUUCGAGCUGCUGCACGCCCC |
| | | UGCCACCGUGUGCGGCCCCAAGAAAAGCACCAACCUGGUGAAGAACAAGUGCGUGAACUUCAACUUUAACGGACU |
| | | GACAGGCACCGGCGUGCUGACCGAGAGCAACAAGAAGUUCCUGCCCUUCCAGCAAUUCGGCCGGGAUAUUGCCG |
| | | ACACCACUGACGCCGUGCGGGACCCCCAGACCCUGGAGAUCCUGGACAUCACACCCUGUAGCUUCGGCGGCGUG |
| | | AGCGUGAUCACCCCCGGCACCAACACCAGCAACCAGGUGGCCGUGCUCUACCAAGGCGUGAACUGCACCGAGGU |
| | | GCCCGUGGCCAUCCACGCCGACCAGCUGACCCCCACCUGGGGGGUGUACAGCACCGGCAGCAACGUGUUCCAGA |
| | | CCCGGGCCGGCUGCCUGAUCGGCGCCGAGCACGUGAAUAACAGCUACGAGUGCGACAUCCCCAUCGGAGCCGGA |
| | | AUCUGCGCCAGCUACCAGACCCAGACCAACAGCCCCCGGAGAGCCCGGAGCGUGGCCAGCCAGAGCAUUAUUGC |
| | | CUACACCAUGAGCCUGGGCGUGGAGAACAGCGUGGCCUACAGCAACAAUAGUAUUGCCAUCCCCACCAACUUCAC |
| | | CAUCAGCGUGACCACCGAAAUCCUCCCCGUGAGCAUGACCAAGACCAGCGUGGACUGCACCAUGUACAUCUGCGG |
| | | CGACAGCACCGAGUGCAGCAACCUGCUCCUGCAGUACGGCAGCUUCUGCACCCAGCUGAACCGGGCCCUGACCG |
| | | GAAUUGCCGUGGAGCAGGACAAGAACACCCAGGAGGUGUUCGCCCAGGUGAAGCAGAUCUACAAGACACCUCCCA |
| | | UCAAGGACUUCGGCGGGUUCAACUUCAGCCAGAUCCUGCCCGACCCCAGCAAGCCCAGCAAGCGGAGCUUCAUC |
| | | GAGGACCUGUUGUUCAACAAGGUGACCCUGGCCGACGCCGGCUUCAUCAAGCAGUACGGCGACUGUCUGGGAGA |
| | | UAUUGCCGCACGGGACCUGAUCUGCGCCCAGAAGUUCAACGGCCUGACCGUGCUGCCCCCACUGCUGACCGACG |
| | | AGAUGAUCGCCCAGUACACAAGCGCUCUGCUCGCCGGCACCAUCACCAGCGGCUGGACCUUCGGCGCCGGCGCU |
| | | GCCCUGCAGAUCCCCUUCGCCAUGCAGAUGGCCUACCGGUUCAACGGCAUCGGCGUGACCCAGAACGUGCUGUA |
| | | CGAGAACCAGAAGCUGAUCGCCAACCAGUUCAACAGCGCCAUCGGCAAGAUCCAGGACAGCCUGAGCUCCACCGC |
| | | CAGCGCCCUGGGCAAGCUGCAGGACGUGGUGAACCAGAACGCCCAGGCCCUGAACACCCUGGUGAAGCAGCUGA |
| | | GCAGCAACUUCGGCGCCAUCAGCUCUGUGCUGAACGACAUCCUGAGCCGGCUGGAUCCUCCUGAGGCCGAGGUG |
| | | CAAAUCGAUCGGCUCAUCACCGGCCGGCUGCAGAGCCUGCAGACCUACGUGACACAGCAGCUGAUCCGGGCCGC |
| | | CGAGAUCCGGGCCAGCGCCAACCUGGCCGCUACCAAGAUGAGCGAGUGCGUGCUGGGCCAGAGCAAGCGGGUGG |
| | | ACUUCUGCGGCAAGGGCUACCACCUGAUGAGCUUCCCCCAGAGCGCCCCCCACGGCGUGGUGUUCCUGCACGUG |
| | | ACCUACGUGCCCGCCCAGGAGAAGAACUUCACCACCGCCCCCGCCAUCUGCCACGACGGCAAGGCCCACUUCCCC |
| | | CGGGAGGGCGUGUUCGUGAGCAACGGCACCCACUGGUUCGUGACCCAGCGGAACUUCUACGAGCCCCAGAUCAU |
| | | AACCACAGACAACACCUUCGUGAGCGGCAACUGCGACGUGGUCAUCGGCAUCGUGAACAACACCGUGUACGACCC |
| | | CCUGCAGCCCGAGCUGGACAGCUUCAAGGAGGAACUGGACAAGUACUUCAAGAACCACACCAGCCCCGACGUGGA |
| | | CCUGGGCGACAUCAGCGGCAUCAACGCCAGCGUGGUGAACAUCCAGAAGGAGAUCGACCGGCUGAACGAGGUGG |
| | | CCAAGAACCUGAACGAGAGCCUGAUCGACCUGCAGGAGCUGGGCAAGUACGAGCAGUACAUCAAGUGGCCCUGG |
| | | UACAUCUGGCUGGGCUUUAUUGCCGGCCUGAUCGCCAUCGUGAUGGUGACCAUCAUGCUGUGCUGUAUGACAAG |
| | | CUGUUGCAGUUGCCUGAAGGGCUGCUGCAGCUGCGGCAGCUGCUGCAAGUUCGACGAGGACGACAGCGAGCCCG |
| | | UGCUGAAGGGCGUGAAGCUGCACUACACC |
| 127 | 2A3430 | AUGUUCGUGUUCCUGGUGCUGCUCCCCCUGGUGAGCUCCCAGUGCGUCAACCUGACCACACGGACCCAGCUGCC |
| | | CCCCGCCUAUACCAACAGCUUCACCCGGGGCGUGUACUAUCCCGACAAGGUGUUCCGGAGCAGCGUGCUGCACA |
| | | GCACCCAGGACCUCUUCCUCCCCUUUUUUAGCAACGUGACCUGGUUCCACGCUAUCAGUGGCACCAACGGCACCA |
| | | AGCGGUUCGACAACCCUGUGCUCCCCUUCAACGACGGCGUGUACUUCGCUAGCACAGAAAAAAGUAACAUCAUUC |
| | | GGGGCUGGAUCUUCGGCACCACACUGGAUAGCAAAACCCAGAGCCUGCUGAUUGUGAAUAACGCCACCAACGUGG |
| | | UGAUCAAGGUGUGCGAGUUCCAGUUCUGCAACGACCCCUUCCUGGGCGUGUACCACAAGAACAACAAGAGCUGGA |
| | | UGGAGAGCGAGUUCCGCGUGUAUAGCUCUGCCAACAACUGCACCUUCGAGUACGUGAGCCAGCCCUUCCUGAUG |
| | | GACCUGGAGGGCAAGCAGGGCAAUUUCAAAAACCUGCGGGAGUUCGUGUUCAAGAACAUCGACGGCUACUUCAAG |
| | | AUCUACAGCAAGCACACCCCCAUCAACCUGGUGCGGGACCUGCCCCAGGGCUUUAGCGCUCUGGAGCCCCUGGU |
| | | GGACCUGCCCAUCGGCAUCAACAUCACCCGCUUCCAAACCCUGUUGGCCCUGCACCGGAGCUACCUGACCCCUG |
| | | GCGAUAGCAGUAGUGGCUGGACAGCCGGAGCCGCCGCCUACUACGUGGGAUACCUGCAGCCCCGGACCUUCCUG |
| | | CUGAAGUACAACGAGAACGGCACAAUCACAGACGCCGUGGACUGCGCCCUGGACCCCCUGAGCGAAACAAAGUGC |
| | | ACCCUCAAAAGUUUCACCGUGGAGAAGGGCAUCUACCAGACCAGCAACUUCCGGGUGCAGCCCACCGAGAGCAUC |
| | | GUGCGGUUCCCCAACAUCACCAACCUGUGCCCCUUCGGCGAGGUGUUCAACGCCACCCGGUUCGCCAGCGUGUA |
| | | CGCCUGGAACCGGAAGCGGAUCAGCAACUGCGUGGCCGACUACAGCGUGCUGUAUAACAGUGCCAGCUUCAGCA |
| | | CCUUCAAGUGCUACGGCGUGAGCCCCACCAAGCUGAACGACCUGUGCUUCACCAACGUGUACGCCGACAGCUUC |
| | | GUGAUCCGGGGCGACGAGGUGCGGCAGAUCGCCCCCGGCCAGACCGGCAAGAUCGCCGAUUACAAUUACAAGCU |
| | | GCCCGACGAUUUCACCGGCUGCGUGAUCGCCUGGAACAGCAACAACCUGGACAGCAAGGUGGGCGGAAACUACAA |
| | | CUACCUGUACCGGCUGUUCCGCAAAAGUAACCUGAAGCCCUUCGAGCGGGACAUCAGCACCGAGAUCUACCAGGC |
| | | CGGCAGUACCCCUUGCAACGGCGUGGAGGGCUUCAACUGCUACUUCCCCCUGCAGAGCUACGGCUUCCAGCCCA |
| | | CCUACGGCGUGGGCUACCAGCCCUACCGGGUGGUGGUUCUGAGCUUCGAGCUGCUGCACGCCCCUGCCACCGU |
| | | GUGCGGCCCCAAGAAAAGCACCAACCUGGUGAAGAACAAGUGCGUGAACUUCAACUUUAACGGACUGACAGGCAC |
| | | CGGCGUGCUGACCGAGAGCAACAAGAAGUUCCUGCCCUUCCAGCAAUUCGGCCGGGACAUCGACGACACCACUGA |
| | | CGCCGUGCGGGACCCCCAGACCCUGGAGAUCCUGGACAUCACACCCUGUAGCUUCGGCGGCGUGAGCGUGAUCA |
| | | CCCCCGGCACCAACACCAGCAACCAGGUGGCCGUGCUCUACCAAGGCGUGAACUGCACCGAGGUGCCCGUGGCC |
| | | AUCCACGCCGACCAGCUGACCCCCACCUGGGGGGUGUACAGCACCGGCAGCAACGUGUUCCAGACCCGGGCCGG |
| | | CUGCCUGAUCGGCGCCGAGCACGUGAAUAACAGCUACGAGUGCGACAUCCCCAUCGGAGCCGGAAUCUGCGCCA |
| | | GCUACCAGACCCAGACCAACAGCCACCGGAGAGCCCGGAGCGUGGCCAGCCAGAGCAUUAUUGCCUACACCAUGA |
| | | GCCUGGGCGCCGAGAACAGCGUGGCCUACAGCAACAAUAGUAUUGCCAUCCCCACCAACUUCACCAUCAGCGUGA |
| | | CCACCGAAAUCCUCCCCGUGAGCAUGACCAAGACCAGCGUGGACUGCACCAUGUACAUCUGCGGCGACAGCACCG |
| | | AGUGCAGCAACCUGCUCCUGCAGUACGGCAGCUUCUGCAUCCAGCUGAACCGGGCCCUGACCGGAAUUGCCGUG |
| | | GAGCAGGACAAGAACACCCAGGAGGUGUUCGCCCAGGUGAAGCAGAUCUACAAGACACCUCCCAUCAAGGACUUC |
| | | GGCGGGUUCAACUUCAGCCAGAUCCUGCCCGACCCCAGCAAGCCCAGCAAGCGGAGCUUCAUCGAGGACCUGUU |
| | | GUUCAACAAGGUGACCCUGGCCGACGCCGGCUUCAUCAAGCAGUACGGCGACUGUCUGGGAGAUAUUGCCGCAC |
| | | GGGACCUGAUCUGCGCCCAGAAGUUCAACGGCCUGACCGUGCUGCCCCCACUGCUGACCGACGAGAUGAUCGCC |
| | | CAGUACACAAGCGCUCUGCUCGCCGGCACCAUCACCAGCGGCUGGACCUUCGGCGCCGGCGCUGCCCUGCAGAU |
| | | CCCCUUCGCCAUGCAGAUGGCCUACCGGUUCAACGGCAUCGGCGUGACCCAGAACGUGCUGUACGAGAACCAGA |
| | | AGCUGAUCGCCAACCAGUUCAACAGCGCCAUCGGCAAGAUCCAGGACAGCCUGAGCUCCACCGCCAGCGCCCUGG |
| | | GCAAGCUGCAGGACGUGGUGAACCAGAACGCCCAGGCCCUGAACACCCUGGUGAAGCAGCUGAGCAGCAACUUC |
| | | GGCGCCAUCAGCUCUGUGCUGAACGACAUCCUGGCCCGGCUGGAUCCUCCUGAGGCCGAGGUGCAAAUCGAUCG |
| | | GCUCAUCACCGGCCGGCUGCAGAGCCUGCAGACCUACGUGACACAGCAGCUGAUCCGGGCCGCCGAGAUCCGGG |
| | | CCAGCGCCAACCUGGCCGCUACCAAGAUGAGCGAGUGCGUGCUGGGCCAGAGCAAGCGGGUGGACUUCUGCGGC |
| | | AAGGGCUACCACCUGAUGAGCUUCCCCCAGAGCGCCCCCCACGGCGUGGUGUUCCUGCACGUGACCUACGUGCC |
| | | CGCCCAGGAGAAGAACUUCACCACCGCCCCCGCCAUCUGCCACGACGGCAAGGCCCACUUCCCCCGGGAGGGCG |
| | | UGUUCGUGAGCAACGGCACCCACUGGUUCGUGACCCAGCGGAACUUCUACGAGCCCCAGAUCAUAACCACACACA |
| | | ACACCUUCGUGAGCGGCAACUGCGACGUGGUCAUCGGCAUCGUGAACAACACCGUGUACGACCCCCUGCAGCCC |
| | | GAGCUGGACAGCUUCAAGGAGGAACUGGACAAGUACUUCAAGAACCACACCAGCCCCGACGUGGACCUGGGCGAC |
| | | AUCAGCGGCAUCAACGCCAGCGUGGUGAACAUCCAGAAGGAGAUCGACCGGCUGAACGAGGUGGCCAAGAACCU |
| | | GAACGAGAGCCUGAUCGACCUGCAGGAGCUGGGCAAGUACGAGCAGUACAUCAAGUGGCCCUGGUACAUCUGGC |
| | | UGGGCUUUAUUGCCGGCCUGAUCGCCAUCGUGAUGGUGACCAUCAUGCUGUGCUGUAUGACAAGCUGUUGCAGU |
| | | UGCCUGAAGGGCUGCUGCAGCUGCGGCAGCUGCUGCAAGUUCGACGAGGACGACAGCGAGCCCGUGCUGAAGG |
| | | GCGUGAAGCUGCACUACACC |
| 128 | 2A8210 | AUGGGCGUCAAGGUCCUGUUCGCCCUGAUCUGUAUUGCCGUGGCCGAGGCCAAGCGGGUGCAGCCCACCGAGAG |
| | | CAUCGUGCGGUUCCCCAACAUCACCAACCUGUGCCCCUUCGGCGAGGUGUUCAACGCCACCCGGUUCGCCAGCG |
| | | UGUACGCCUGGAACCGGAAGCGGAUCAGCAACUGCGUGGCCGACUACAGCGUGCUGUACAACAGCGCCAGCUUC |
| | | AGCACCUUCAAGUGCUACGGCGUGAGCCCCACCAAGCUGAACGACCUGUGCUUCACCAACGUGUACGCCGACAGC |
| | | UUCGUGAUCCGGGGCGACGAGGUGCGGCAGAUCGCCCCCGGCCAGACAGGCAACAUUGCUGAUUACAAUUACAA |
| | | GCUGCCCGACGAUUUCACCGGCUGCGUGAUCGCCUGGAACAGCAACAAUCUGGACAGCAAGGUGGGGGAAACU |
| | | ACAACUACCUGUACCGGCUGUUCCGCAAAAGUAACCUCAAGCCUUUCGAGCGGGACAUCAGCACCGAGAUCUACC |
| | | AGGCCGGCAGCACCCCCUGCAACGGCGUGAAGGGCUUCAACUGCUACUUCCCCCUGCAGAGCUACGGCUUCCAG |
| | | CCCACCUACGGCGUGGGCUACCAGCCCUACCGGGUGGUCGUGCUGAGCUUCGAGCUGCUCCACGCCCCCGCCAC |
| | | CGUGUGCGGCCCCAAGAAAAGCACCAACCUGGUGAAGAACAAGUGCGUGAACUUC |
| 129 | 2A9200 | AUGUUCGUGUUCCUGGUGCUGCUCCCCCUGGUGAGCUCCCAGUGCGUCAACUUUACCACCCGGACCCAGCUGCC |
| | | CCCCGCCUAUACCAACAGCUUCACCCGCGGCGUCUACUACCCCGACAAGGUGUUCCGGAGCAGCGUGCUGCACA |
| | | GCACCCAGGACCUCUUCCUCCCCUUUUUUAGCAACGUGACCUGGUUCCACGCCAUCCACGUGAGUGGCACCAACG |
| | | GCACCAAGCGGUUCGCCAACCCUGUGCUCCCCUUCAACGACGGCGUGUACUUCGCUAGCACAGAAAAAAGUAACA |
| | | UCAUUCGGGGCUGGAUCUUCGGCACCACACUGGAUAGCAAAACCCAGAGCCUGCUGAUUGUGAAUAACGCCACCA |
| | | ACGUGGUGAUCAAGGUGUGCGAGUUCCAGUUCUGCAACGACCCCUUCCUGGGCGUGUACUACCACAAGAACAACA |
| | | AGAGCUGGAUGGAGAGCGAGUUCCGCGUGUAUAGCUCUGCCAACAACUGCACCUUCGAGUACGUGAGCCAGCCC |
| | | UUCCUGAUGGACCUGGAGGGCAAGCAGGGCAAUUUCAAAAACCUGCGGGAGUUCGUGUUCAAGAACAUCGACGG |
| | | CUACUUCAAGAUCUACAGCAAGCACACCCCCAUCAACCUGGUGCGGGGCCUGCCCCAGGGCUUUAGCGCUCUGG |
| | | AGCCCCUGGUGGACCUGCCCAUCGGCAUCAACAUCACCCGCUUCCAAACCCUGCACAUCAGCUACCUGACCCCUG |
| | | GCGAUAGCAGUAGUGGCUGGACAGCCGGAGCCGCCGCCUACUACGUGGGAUACCUGCAGCCCCGGACCUUCCUG |
| | | UUGAAGUACAACGAGAACGGCACAAUCACAGACGCCGUGGACUGCGCCCUGGACCCCCUGAGCGAAACAAAGUGC |
| | | ACCCUCAAAAGUUUCACCGUGGAGAAGGGCAUCUACCAGACCAGCAACUUCCGGGUGCAGCCCACCGAGAGCAUC |
| | | GUGCGGUUCCCCAACAUCACCAACCUGUGCCCCUUCGGCGAGGUGUUCAACGCCACCCGGUUCGCCAGCGUGUA |
| | | CGCCUGGAACCGGAAGCGGAUCAGCAACUGCGUGGCCGACUACAGCGUGCUGUAUAACAGUGCCAGCUUCAGCA |
| | | CCUUCAAGUGCUACGGCGUGAGCCCCACCAAGCUGAACGACCUGUGCUUCACCAACGUGUACGCCGACAGCUUC |
| | | GUGAUCCGGGGCGACGAGGUGCGGCAGAUCGCCCCCGGCCAGACCGGCAAUAUUGCUGACUAUAACUAUAAGCU |
| | | GCCCGACGAUUUCACCGGCUGCGUGAUCGCCUGGAACAGCAACAACCUGGACAGCAAGGUGGGCGGAAACUACAA |
| | | CUACCUGUACCGGCUGUUCCGCAAAAGUAACCUCAAGCCUUUCGAGCGGGACAUCAGCACCGAGAUCUACCAGGC |
| | | CGGCAGUACCCCUUGCAACGGCGUGAAGGGCUUCAACUGCUACUUCCCCCUGCAGAGCUACGGCUUCCAGCCCA |
| | | CCUACGGCGUGGGCUACCAGCCCUACCGGGUGGUGGUUCUGAGCUUCGAGCUGCUGCACGCCCCUGCCACCGU |
| | | GUGCGGCCCCAAGAAAAGCACCAACCUGGUGAAGAACAAGUGCGUGAACUUCAACUUUAACGGACUGACAGGCAC |
| | | CGGCGUGCUGACCGAGAGCAACAAGAAGUUCCUGCCCUUCCAGCAAUUCGGCCGGGAUAUUGCCGACACCACUG |
| | | ACGCCGUGCGGGACCCCCAGACCCUGGAGAUCCUGGACAUCACACCCUGUAGCUUCGGCGGCGUGAGCGUGAUC |
| | | ACCCCCGGCACCAACACCAGCAACCAGGUGGCCGUGCUCUACCAAGGCGUGAACUGCACCGAGGUGCCCGUGGC |
| | | CAUCCACGCCGACCAGCUGACCCCCACCUGGCGGGUGUACAGCACCGGCAGCAACGUGUUCCAGACCCGGGCCG |
| | | GCUGCCUGAUCGGCGCCGAGCACGUGAAUAACAGCUACGAGUGCGACAUCCCCAUCGGAGCCGGAAUCUGCGCC |
| | | AGCUACCAGACCCAGACCAACAGCCCCCGGAGAGCCCGGAGCGUGGCCAGCCAGAGCAUUAUUGCCUACACCAUG |
| | | AGCCUGGGCGUGGAGAACAGCGUGGCCUACAGCAACAAUAGUAUUGCCAUCCCCACCAACUUCACCAUCAGCGUG |
| | | ACCACCGAAAUCCUCCCCGUGAGCAUGACCAAGACCAGCGUGGACUGCACCAUGUACAUCUGCGGCGACAGCACC |
| | | GAGUGCAGCAACCUGCUGCUCCAGUACGGCAGCUUCUGCACCCAGCUGAACCGGGCCCUGACCGGAAUUGCCGU |
| | | GGAGCAGGACAAGAACACCCAGGAGGUGUUCGCCCAGGUGAAGCAGAUCUACAAGACACCUCCCAUCAAGGACUU |
| | | CGGCGGGUUCAACUUCAGCCAGAUCCUGCCCGACCCCAGCAAGCCCAGCAAGCGGAGCUUCAUCGAGGACCUGC |
| | | UGUUCAACAAGGUGACCCUGGCCGACGCCGGCUUCAUCAAGCAGUACGGCGACUGUCUGGGAGAUAUUGCCGCA |
| | | CGGGACCUGAUCUGCGCCCAGAAGUUCAACGGCCUGACCGUGCUGCCCCCACUGUUGACCGACGAGAUGAUCGC |
| | | CCAGUACACAAGCGCUCUGCUGGCCGGCACCAUCACCAGCGGCUGGACCUUCGGCGCCGGCGCUGCCCUGCAGA |
| | | UCCCCUUCGCCAUGCAGAUGGCCUACCGGUUCAACGGCAUCGGCGUGACCCAGAACGUGCUGUACGAGAACCAG |
| | | AAGCUGAUCGCCAACCAGUUCAACAGCGCCAUCGGCAAGAUCCAGGACAGCCUGAGCUCCACCGCCAGCGCCCUG |
| | | GGCAAGCUGCAGGACGUGGUGAACCAGAACGCCCAGGCCCUGAACACCCUGGUGAAGCAGCUGAGCAGCAACUU |
| | | CGGCGCCAUCAGCUCUGUGCUGAACGACAUCCUGAGCCGGCUGGAUCCUCCUGAGGCCGAGGUGCAAAUCGAUC |
| | | GGCUCAUCACCGGCCGGCUGCAGAGCCUGCAGACCUACGUGACACAGCAGCUGAUCCGGGCCGCCGAGAUCCGG |
| | | GCCAGCGCCAACCUGGCCGCUACCAAGAUGAGCGAGUGCGUGCUGGGCCAGAGCAAGCGGGUGGACUUCUGCGG |
| | | CAAGGGCUACCACCUGAUGAGCUUCCCCCAGAGCGCCCCCCACGGCGUGGUGUUCCUGCACGUGACCUACGUGC |
| | | CCGCCCAGGAGAAGAACUUCACCACCGCCCCCGCCAUCUGCCACGACGGCAAGGCCCACUUCCCCCGGGAGGGC |
| | | GUGUUCGUGAGCAACGGCACCCACUGGUUCGUGACCCAGCGGAACUUCUACGAGCCCCAGAUCAUAACCACAGAC |
| | | AACACCUUCGUGAGCGGCAACUGCGACGUGGUCAUCGGCAUCGUGAACAACACCGUGUACGACCCCCUGCAGCC |
| | | CGAGCUGGACAGCUUCAAGGAGGAACUGGACAAGUACUUCAAGAACCACACCAGCCCCGACGUGGACCUGGGCGA |
| | | CAUCAGCGGCAUCAACGCCAGCGUGGUGAACAUCCAGAAGGAGAUCGACCGGCUGAACGAGGUGGCCAAGAACCU |
| | | GAACGAGAGCCUGAUCGACCUGCAGGAGCUGGGCAAGUACGAGCAGUACAUCAAGUGGCCCUGGUACAUCUGGC |
| | | UGGGCUUUAUUGCCGGCCUGAUCGCCAUCGUGAUGGUGACCAUCAUGCUGUGCUGUAUGACAAGCUGUUGCAGU |
| | | UGCCUGAAGGGCUGCUGCAGCUGCGGCAGCUGCUGCAAGUUCGACGAGGACGACAGCGAGCCCGUGCUGAAGG |
| | | GCGUGAAGCUGCACUACACC |
| 130 | 2A7020 | AUGUUCGUGUUCCUGGUGCUGCUGCCUCUGGUGUCCAGCCAGUGUGUGAACCUGACCACCAGAACACAGCUGCC |
| | | UCCAGCCUACACCAACAGCUUUACCAGAGGCGUGUACUACCCCGACAAGGUGUUCAGAUCCAGCGUGCUGCACUC |
| | | UACCCAGGACCUGUUCCUGCCUUUCUUCAGCAACGUGACCUGGUUCCACGCCAUCCACGUGUCCGGCACCAAUG |
| | | GCACCAAGAGAUUCGACAACCCCGUGCUGCCCUUCAACGACGGGGUGUACUUUGCCAGCACCGAGAAGUCCAACA |
| | | UCAUCAGAGGCUGGAUCUUCGGCACCACACUGGACAGCAAGACCCAGAGCCUGCUGAUCGUGAACAACGCCACCA |
| | | ACGUGGUCAUCAAAGUGUGCGAGUUCCAGUUCUGCAACGACCCCUUCCUGGGCGUCUACUACCACAAGAACAACA |
| | | AGAGCUGGAUGGAAAGCGAGUUCCGGGUGUACAGCAGCGCCAACAACUGCACCUUCGAGUACGUGUCCCAGCCU |
| | | UUCCUGAUGGACCUGGAAGGCAAGCAGGGCAACUUCAAGAACCUGCGCGAGUUCGUGUUUAAGAACAUCGACGG |
| | | CUACUUCAAGAUCUACAGCAAGCACACCCCUAUCAACCUCGUGCGGGAUCUGCCUCAGGGCUUCUCUGCUCUGGA |
| | | ACCCCUGGUGGAUCUGCCCAUCGGCAUCAACAUCACCCGGUUUCAGACACUGCUGGCCCUGCACAGAAGCUACCU |
| | | GACACCUGGCGAUAGCAGCAGCGGAUGGACAGCUGGUGCCGCCGCUUACUAUGUGGGCUACCUGCAGCCUAGAA |
| | | CCUUCCUGCUGAAGUACAACGAGAACGGCACCAUCACCGACGCCGUGGAUUGUGCUCUGGAUCCUCUGAGCGAG |
| | | ACAAAGUGCACCCUGAAGUCCUUCACCGUGGAAAAGGGCAUCUACCAGACCAGCAACUUCCGGGUGCAGCCCACC |
| | | GAAUCCAUCGUGCGGUUCCCCAAUAUCACCAAUCUGUGCCCCUUCGGCGAGGUGUUCAAUGCCACCAGAUUCGCC |
| | | UCUGUGUACGCCUGGAACCGGAAGCGGAUCAGCAAUUGCGUGGCCGACUACUCCGUGCUGUACAACUCCGCCAG |
| | | CUUCAGCACCUUCAAGUGCUACGGCGUGUCCCCUACCAAGCUGAACGACCUGUGCUUCACAAACGUGUACGCCGA |
| | | CAGCUUCGUGAUCCGGGGAGAUGAAGUGCGGCAGAUUGCCCCUGGACAGACAGGCAAGAUCGCCGACUACAACU |
| | | ACAAGCUGCCCGACGACUUCACCGGCUGUGUGAUUGCCUGGAACAGCAACAACCUGGACUCCAAAGUCGGCGGCA |
| | | ACUACAAUUACCUGUACCGGCUGUUCCGGAAGUCCAAUCUGAAGCCCUUCGAGCGGGACAUCUCCACCGAGAUCU |
| | | AUCAGGCCGGCAGCACCCCUUGUAACGGCGUGGAAGGCUUCAACUGCUACUUCCCACUGCAGUCCUACGGCUUU |
| | | CAGCCCACAAAUGGCGUGGGCUAUCAGCCCUACAGAGUGGUGGUGCUGAGCUUCGAACUGCUGCAUGCCCCUGC |
| | | CACAGUGUGCGGCCCUAAGAAAAGCACCAAUCUCGUGAAGAACAAAUGCGUGAACUUCAACUUCAACGGCCUGAC |
| | | CGGCACCGGCGUGCUGACAGAGAGCAACAAGAAGUUCCUGCCAUUCCAGCAGUUUGGCCGGGAUAUCGCCGAUA |
| | | CCACAGACGCCGUUAGAGAUCCCCAGACACUGGAAAUCCUGGACAUCACCCCUUGCAGCUUCGGCGGAGUGUCU |
| | | GUGAUCACCCCUGGCACCAACACCAGCAAUCAGGUGGCAGUGCUGUACCAGGACGUGAACUGUACCGAAGUGCCC |
| | | GUGGCCAUUCACGCCGAUCAGCUGACACCUACAUGGCGGGUGUACUCCACCGGCAGCAAUGUGUUUCAGACCAG |
| | | AGCCGGCUGUCUGAUCGGAGCCGAGCACGUGAACAAUAGCUACGAGUGCGACAUCCCCAUCGGCGCUGGAAUCU |
| | | GCGCCAGCUACCAGACACAGACAAACAGCCCUCGGAGAGCCAGAAGCGUGGCCAGCCAGAGCAUCAUUGCCUACA |
| | | CAAUGUCUCUGGGCGCCGAGAACAGCGUGGCCUACUCCAACAACUCUAUCGCUAUCCCCACCAACUUCACCAUCA |
| | | GCGUGACCACAGAGAUCCUGCCUGUGUCCAUGACCAAGACCAGCGUGGACUGCACCAUGUACAUCUGCGGCGAU |
| | | UCCACCGAGUGCUCCAACCUGCUGCUGCAGUACGGCAGCUUCUGCACCCAGCUGAAUAGAGCCCUGACAGGGAU |
| | | CGCCGUGGAACAGGACAAGAACACCCAAGAGGUGUUCGCCCAAGUGAAGCAGAUCUACAAGACCCCUCCUAUCAA |
| | | GGACUUCGGCGGCUUCAAUUUCAGCCAGAUUCUGCCCGAUCCUAGCAAGCCCAGCAAGCGGAGCUUCAUCGAGG |
| | | ACCUGCUGUUCAACAAAGUGACACUGGCCGACGCCGGCUUCAUCAAGCAGUAUGGCGAUUGUCUGGGCGACAUU |
| | | GCCGCCAGGGAUCUGAUUUGCGCCCAGAAGUUUAACGGACUGACAGUGCUGCCUCCUCUGCUGACCGAUGAGAU |
| | | GAUCGCCCAGUACACAUCUGCCCUGCUGGCCGGCACAAUCACAAGCGGCUGGACAUUUGGAGCAGGCGCCGCUC |
| | | UGCAGAUCCCCUUUGCUAUGCAGAUGGCCUACCGGUUCAACGGCAUCGGAGUGACCCAGAAUGUGCUGUACGAG |
| | | AACCAGAAGCUGAUCGCCAACCAGUUCAACAGCGCCAUCGGCAAGAUCCAGGACAGCCUGAGCAGCACAGCAAGC |
| | | GCCCUGGGAAAGCUGCAGGACGUGGUCAACCAGAAUGCCCAGGCACUGAACACCCUGGUCAAGCAGCUGUCCUC |
| | | CAACUUCGGCGCCAUCAGCUCUGUGCUGAACGAUAUCCUGAGCAGACUGGACCCUCCUGAGGCCGAGGUGCAGA |
| | | UCGACAGACUGAUCACAGGCAGACUGCAGAGCCUCCAGACAUACGUGACCCAGCAGCUGAUCAGAGCCGCCGAGA |
| | | UUAGAGCCUCUGCCAAUCUGGCCGCCACCAAGAUGUCUGAGUGUGUGCUGGGCCAGAGCAAGAGAGUGGACUUU |
| | | UGCGGCAAGGGCUACCACCUGAUGAGCUUCCCUCAGUCUGCCCCUCACGGCGUGGUGUUUCUGCACGUGACAUA |
| | | UGUGCCCGCUCAAGAGAAGAAUUUCACCACCGCUCCAGCCAUCUGCCACGACGGCAAAGCCCACUUUCCUAGAGA |
| | | AGGCGUGUUCGUGUCCAACGGCACCCAUUGGUUCGUGACACAGCGGAACUUCUACGAGCCCCAGAUCAUCACCAC |
| | | CGACAACACCUUCGUGUCUGGCAACUGCGACGUCGUGAUCGGCAUUGUGAACAAUACCGUGUACGACCCUCUGCA |
| | | GCCCGAGCUGGACAGCUUCAAAGAGGAACUGGACAAGUACUUUAAGAACCACACAAGCCCCGACGUGGACCUGGG |
| | | CGAUAUCAGCGGAAUCAAUGCCAGCGUCGUGAACAUCCAGAAAGAGAUCGACCGGCUGAACGAGGUGGCCAAGAA |
| | | UCUGAACGAGAGCCUGAUCGACCUGCAAGAACUGGGGAAGUACGAGCAGUACAUCAAGUGGCCCUGGUACAUCUG |
| | | GCUGGGCUUUAUCGCCGGACUGAUUGCCAUCGUGAUGGUCACAAUCAUGCUGUGUUGCAUGACCAGCUGCUGUA |
| | | GCUGCCUGAAGGGCUGUUGUAGCUGUGGCAGCUGCUGCAAGUUCGACGAGGACGAUUCUGAGCCCGUGCUGAAG |
| | | GGCGUGAAACUGCACUACACA |
| 131 | 2A8620 | AUGUUUGUUUUUCUUGUUUUAUUGCCACUAGUCUCUAGUCAGUGUGUUAAUCUUACAACCAGAACUCAAUUACCC |
| | | CCUGCAUACACUAAUUCUUUCACACGUGGUGUUUAUUACCCUGACAAAGUUUUCAGAUCCUCAGUUUUACAUUCA |
| | | ACUCAGGAUUUGUUCUUACCUUUCUUUUCCAAUGUUACUUGGUUCCAUGCUAUACAUGUCUCUGGGACCAAUGGU |
| | | ACUAAGAGGUUUGAUAACCCUGUCCUACCAUUUAAUGAUGGUGUUUAUUUUGCUUCCACUGAGAAGUCUAACAUA |
| | | AUAAGAGGCUGGAUCUUUGGUACUACUUUAGAUUCGAAGACCCAGUCCCUACUUAUUGUUAAUAACGCUACUAAU |
| | | GUUGUUAUUAAAGUCUGUGAAUUUCAAUUUUGUAAUGAUCCAUUUUUGGGUGUUUAUUACCACAAAAACAACAAAA |
| | | GUUGGAUGGAAAGUGAGUUCAGAGUUUAUUCUAGUGCGAAUAAUUGCACUUUUGAAUAUGUCUCUCAGCCUUUUC |
| | | UUAUGGACCUUGAAGGAAAACAGGGUAAUUUCAAAAAUCUUAGGGAAUUUGUGUUUAAGAAUAUUGAUGGUUAUU |
| | | UUAAAAUAUAUUCUAAGCACACGCCUAUUAAUUUAGUGCGUGAUCUCCCUCAGGGUUUUUCGGCUUUAGAACCAU |
| | | UGGUAGAUUUGCCAAUAGGUAUUAACAUCACUAGGUUUCAAACUUUACUUGCUUUACAUAGAAGUUAUUUGACUC |
| | | CUGGUGAUUCUUCUUCAGGUUGGACAGCUGGUGCUGCAGCUUAUUAUGUGGGUUAUCUUCAACCUAGGACUUUU |
| | | CUAUUAAAAUAUAAUGAAAAUGGAACCAUUACAGAUGCUGUAGACUGUGCACUUGACCCUCUCUCAGAAACAAAGU |
| | | GUACGUUGAAAUCCUUCACUGUAGAAAAAGGAAUCUAUCAAACUUCUAACUUUAGAGUCCAACCAACAGAAUCUAU |
| | | UGUUAGAUUUCCUAAUAUUACAAACUUGUGCCCUUUUGGUGAAGUUUUUAACGCCACCAGAUUUGCAUCCGUGUA |
| | | UGCUUGGAACAGGAAGAGAAUCAGCAACUGUGUUGCUGAUUAUUCUGUCCUAUAUAAUUCCGCAUCAUUUUCCAC |
| | | UUUUAAGUGUUAUGGAGUGUCUCCUACUAAAUUAAAUGAUCUCUGCUUUACUAAUGUCUAUGCAGAUUCAUUUGU |
| | | AAUUAGAGGUGAUGAAGUCAGACAAAUCGCUCCAGGGCAAACUGGAAAGAUUGCUGAUUAUAAUUAUAAAUUACCA |
| | | GAUGAUUUUACAGGCUGCGUUAUAGCUUGGAAUUCUAACAAUCUUGAUUCUAAGGUUGGUGGUAAUUAUAAUUAC |
| | | CUGUAUAGAUUGUUUAGGAAGUCUAAUCUCAAACCUUUUGAGAGAGAUAUUUCAACUGAAAUCUAUCAGGCCGGU |
| | | AGCACACCUUGUAAUGGUGUUGAAGGUUUUAAUUGUUACUUUCCUUUACAAUCAUAUGGUUUCCAACCCACUAAU |
| | | GGUGUUGGUUACCAACCAUACAGAGUAGUAGUACUUUCUUUUGAACUUCUACAUGCACCAGCAACUGUUUGUGGA |
| | | CCUAAAAAGUCUACUAAUUUGGUUAAAAACAAAUGUGUCAAUUUCAACUUCAAUGGUUUAACAGGCACAGGUGUUC |
| | | UUACUGAGUCUAACAAAAAGUUUCUGCCUUUCCAACAAUUUGGCAGAGACAUUGCUGACACUACUGAUGCUGUCC |
| | | GUGAUCCACAGACACUUGAGAUUCUUGACAUUACACCAUGUUCUUUUGGUGGUGUCAGUGUUAUAACACCAGGAA |
| | | CAAAUACUUCUAACCAGGUUGCUGUUCUUUAUCAGGAUGUUAACUGCACAGAAGUCCCUGUUGCUAUUCAUGCAG |
| | | AUCAACUUACUCCUACUUGGCGUGUUUAUUCUACAGGUUCUAAUGUUUUUCAAACACGUGCAGGCUGUUUAAUAG |
| | | GGGCUGAACAUGUCAACAACUCAUAUGAGUGUGACAUACCCAUUGGUGCAGGUAUAUGCGCUAGUUAUCAGACUC |
| | | AGACUAAUUCUCCUCGGCGGGCACGUAGUGUAGCUAGUCAAUCCAUCAUUGCCUACACUAUGUCACUUGGUGCAG |
| | | AAAAUUCAGUUGCUUACUCUAAUAACUCUAUUGCCAUACCCACAAAUUUUACUAUUAGUGUUACCACAGAAAUUCU |
| | | ACCAGUGUCUAUGACCAAGACAUCAGUAGAUUGUACAAUGUACAUUUGUGGUGAUUCAACUGAAUGCAGCAAUCU |
| | | UUUGUUGCAAUAUGGCAGUUUUUGUACACAAUUAAACCGUGCUUUAACUGGGAUAGCUGUUGAACAAGACAAAAA |
| | | CACCCAAGAAGUUUUUGCACAAGUCAAACAAAUUUACAAAACACCACCAAUUAAAGAUUUUGGUGGUUUUAAUUUU |
| | | UCACAAAUAUUACCAGAUCCAUCAAAACCAAGCAAGAGGUCAUUUAUUGAAGAUCUACUUUUCAACAAAGUGACAC |
| | | UUGCAGAUGCUGGCUUCAUCAAACAAUAUGGUGAUUGCCUUGGUGAUAUUGCUGCUAGGGACCUCAUUUGUGCA |
| | | CAAAAGUUUAACGGCCUUACUGUUUUGCCACCUUUGCUCACAGAUGAAAUGAUUGCUCAAUACACUUCUGCACUG |
| | | UUAGCGGGUACAAUCACUUCUGGUUGGACCUUUGGUGCAGGUGCUGCAUUACAAAUACCAUUUGCUAUGCAAAUG |
| | | GCUUAUAGGUUUAAUGGUAUUGGAGUUACACAGAAUGUUCUCUAUGAGAACCAAAAAUUGAUUGCCAACCAAUUUA |
| | | AUAGUGCCAUUGGCAAAAUUCAAGACUCACUUUCUUCCACAGCAAGUGCACUUGGAAAACUUCAAGAUGUGGUCA |
| | | ACCAAAAUGCACAAGCUUUAAACACGCUUGUUAAACAACUUAGCUCCAAUUUUGGUGCAAUUUCAAGUGUUUUAAA |
| | | UGAUAUCCUUUCACGUCUUGACCCUCCCGAGGCUGAAGUGCAAAUUGAUAGGUUGAUCACAGGCAGACUUCAAAG |
| | | UUUGCAGACAUAUGUGACUCAACAAUUAAUUAGAGCUGCAGAAAUCAGAGCUUCUGCUAAUCUUGCUGCUACUAAA |
| | | AUGUCAGAGUGUGUACUUGGACAAUCAAAAAGAGUUGAUUUUUGUGGAAAGGGCUAUCAUCUUAUGUCCUUCCCU |
| | | CAGUCAGCACCUCAUGGUGUAGUCUUCUUGCAUGUGACUUAUGUCCCUGCACAAGAAAAGAACUUCACAACUGCU |
| | | CCUGCCAUUUGUCAUGAUGGAAAAGCACACUUUCCUCGUGAAGGUGUCUUUGUUUCAAAUGGCACACACUGGUUU |
| | | GUAACACAAAGGAAUUUUUAUGAACCACAAAUCAUUACUACAGACAACACAUUUGUGUCUGGUAACUGUGAUGUUG |
| | | UAAUAGGAAUUGUCAACAACACAGUUUAUGAUCCUUUGCAACCUGAAUUAGACUCAUUCAAGGAGGAGUUAGAUAA |
| | | AUAUUUUAAGAAUCAUACAUCACCAGAUGUUGAUUUAGGUGACAUCUCUGGCAUUAAUGCUUCAGUUGUAAACAUU |
| | | CAAAAAGAAAUUGACCGCCUCAAUGAGGUUGCCAAGAAUUUAAAUGAAUCUCUCAUCGAUCUCCAAGAACUUGGAA |
| | | AGUAUGAGCAGUAUAUAAAAUGGCCAUGGUACAUUUGGCUAGGUUUUAUAGCUGGCUUGAUUGCCAUAGUAAUGG |
| | | UGACAAUUAUGCUUUGCUGUAUGACCAGUUGCUGUAGUUGUCUCAAGGGCUGUUGUUCUUGUGGAUCCUGCUGC |
| | | AAAUUUGAUGAAGACGACUCUGAGCCAGUGCUCAAAGGAGUCAAAUUACAUUACACA |
| 132 | 2A9420 | AUGUUCGUGUUCCUGGUGCUGCUGCCUCUGGUGUCCAGCCAGUGUGUGAACCUGACCACCAGAACACAGCUGCC |
| | | UCCAGCCUACACCAACAGCUUUACCAGAGGCGUGUACUACCCCGACAAGGUGUUCAGAUCCAGCGUGCUGCACUC |
| | | UACCCAGGACCUGUUCCUGCCUUUCUUCAGCAACGUGACCUGGUUCCACGCCAUCCACGUGUCCGGCACCAACG |
| | | GCACCAAGAGAUUCGACAACCCCGUGCUGCCCUUCAACGACGGGGUGUACUUUGCCAGCACCGAGAAGUCCAACA |
| | | UCAUCAGAGGCUGGAUCUUCGGCACCACACUGGACAGCAAGACCCAGAGCCUGCUGAUCGUGAACAACGCCACCA |
| | | ACGUGGUCAUCAAAGUGUGCGAGUUCCAGUUCUGCAACGACCCCUUCCUGGGCGUCUACUACCACAAGAACAACA |
| | | AGAGCUGGAUGGAAAGCGAGUUCCGGGUGUACAGCAGCGCCAACAACUGCACCUUCGAGUACGUGUCCCAGCCU |
| | | UUCCUGAUGGACCUGGAAGGCAAGCAGGGCAACUUCAAGAACCUGCGCGAGUUCGUGUUUAAGAACAUCGACGG |
| | | CUACUUCAAGAUCUACAGCAAGCACACCCCUAUCAACCUCGUGCGGGAUCUGCCUCAGGGCUUCUCUGCUCUGGA |
| | | ACCCCUGGUGGAUCUGCCCAUCGGCAUCAACAUCACCCGGUUUCAGACACUGCUGGCCCUGCACAGAAGCUACCU |
| | | GACACCUGGCGAUAGCAGCAGCGGCUGGACAGCUGGUGCCGCCGCUUACUACGUGGGCUACCUGCAGCCUAGAA |
| | | CCUUCCUGCUGAAGUACAACGAGAACGGCACCAUCACCGACGCCGUGGAUUGUGCUCUGGAUCCUCUGAGCGAG |
| | | ACAAAGUGCACCCUGAAGUCCUUCACCGUGGAAAAGGGCAUCUACCAGACCAGCAACUUCCGGGUGCAGCCCACC |
| | | GAAUCCAUCGUGCGGUUCCCCAAUAUCACCAAUCUGUGCCCCUUCGGCGAGGUGUUCAACGCCACCAGAUUCGCC |
| | | UCUGUGUACGCCUGGAACCGGAAGCGGAUCAGCAAUUGCGUGGCCGACUACUCCGUGCUGUACAACUCCGCCAG |
| | | CUUCAGCACCUUCAAGUGCUACGGCGUGUCCCCUACCAAGCUGAACGACCUGUGCUUCACAAACGUGUACGCCGA |
| | | CAGCUUCGUGAUCCGGGGAGACGAAGUGCGGCAGAUUGCCCCUGGACAGACAGGCAAGAUCGCCGACUACAACU |
| | | ACAAGCUGCCCGACGACUUCACCGGCUGUGUGAUUGCCUGGAACAGCAACAACCUGGACUCCAAAGUCGGCGGCA |
| | | ACUACAAUUACCUGUACCGGCUGUUCCGGAAGUCCAAUCUGAAGCCCUUCGAGCGGGACAUCUCCACCGAGAUCU |
| | | AUCAGGCCGGCAGCACCCCUUGUAACGGCGUGGAAGGCUUCAACUGCUACUUCCCACUGCAGUCCUACGGCUUU |
| | | CAGCCCACAAACGGCGUGGGCUAUCAGCCCUACAGAGUGGUGGUGCUGAGCUUCGAACUGCUGCACGCCCCUGC |
| | | CACAGUGUGCGGCCCUAAGAAAAGCACCAAUCUCGUGAAGAACAAGUGCGUGAACUUCAACUUCAACGGCCUGAC |
| | | CGGCACCGGCGUGCUGACAGAGAGCAACAAGAAGUUCCUGCCAUUCCAGCAGUUUGGCCGGGAUAUCGCCGAUA |
| | | CCACAGACGCCGUUAGAGAUCCCCAGACACUGGAAAUCCUGGACAUCACCCCUUGCAGCUUCGGCGGAGUGUCU |
| | | GUGAUCACCCCUGGCACCAACACCAGCAAUCAGGUGGCAGUGCUGUACCAGGACGUGAACUGUACCGAAGUGCCC |
| | | GUGGCCAUUCACGCCGAUCAGCUGACACCUACCUGGCGGGUGUACUCCACCGGCAGCAACGUGUUUCAGACCAG |
| | | AGCCGGCUGUCUGAUCGGAGCCGAGCACGUGAACAAUAGCUACGAGUGCGACAUCCCCAUCGGCGCUGGAAUCU |
| | | GCGCCAGCUACCAGACACAGACAAACAGCCCUCGGAGAGCCAGAAGCGUGGCCAGCCAGAGCAUCAUUGCCUACA |
| | | CAAUGUCUCUGGGCGCCGAGAACAGCGUGGCCUACUCCAACAACUCUAUCGCUAUCCCCACCAACUUCACCAUCA |
| | | GCGUGACCACAGAGAUCCUGCCUGUGUCCAUGACCAAGACCAGCGUGGACUGCACCAUGUACAUCUGCGGCGAU |
| | | UCCACCGAGUGCUCCAACCUGCUGCUGCAGUACGGCAGCUUCUGCACCCAGCUGAAUAGAGCCCUGACAGGGAU |
| | | CGCCGUGGAACAGGACAAGAACACCCAAGAGGUGUUCGCCCAAGUGAAGCAGAUCUACAAGACCCCUCCUAUCAA |
| | | GGACUUCGGCGGCUUCAAUUUCAGCCAGAUUCUGCCCGAUCCUAGCAAGCCCAGCAAGCGGAGCUUCAUCGAGG |
| | | ACCUGCUGUUCAACAAAGUGACACUGGCCGACGCCGGCUUCAUCAAGCAGUACGGCGAUUGUCUGGGCGACAUU |
| | | GCCGCCAGGGAUCUGAUUUGCGCCCAGAAGUUUAACGGACUGACAGUGCUGCCUCCUCUGCUGACCGACGAGAU |
| | | GAUCGCCCAGUACACAUCUGCCCUGCUGGCCGGCACAAUCACAAGCGGCUGGACAUUUGGAGCAGGCGCCGCUC |
| | | UGCAGAUCCCCUUUGCUAUGCAGAUGGCCUACCGGUUCAACGGCAUCGGAGUGACCCAGAACGUGCUGUACGAG |
| | | AACCAGAAGCUGAUCGCCAACCAGUUCAACAGCGCCAUCGGCAAGAUCCAGGACAGCCUGAGCAGCACAGCAAGC |
| | | GCCCUGGGAAAGCUGCAGGACGUGGUCAACCAGAACGCCCAGGCACUGAACACCCUGGUCAAGCAGCUGUCCUC |
| | | CAACUUCGGCGCCAUCAGCUCUGUGCUGAACGAUAUCCUGAGCAGACUGGACCCUCCUGAGGCCGAGGUGCAGA |
| | | UCGACAGACUGAUCACAGGCAGACUGCAGAGCCUCCAGACAUACGUGACCCAGCAGCUGAUCAGAGCCGCCGAGA |
| | | UUAGAGCCUCUGCCAAUCUGGCCGCCACCAAGAUGUCUGAGUGUGUGCUGGGCCAGAGCAAGAGAGUGGACUUU |
| | | UGCGGCAAGGGCUACCACCUGAUGAGCUUCCCUCAGUCUGCCCCUCACGGCGUGGUGUUUCUGCACGUGACAUA |
| | | CGUGCCCGCUCAAGAGAAGAAUUUCACCACCGCUCCAGCCAUCUGCCACGACGGCAAAGCCCACUUUCCUAGAGA |
| | | AGGCGUGUUCGUGUCCAACGGCACCCAUUGGUUCGUGACACAGCGGAACUUCUACGAGCCCCAGAUCAUCACCAC |
| | | CGACAACACCUUCGUGUCUGGCAACUGCGACGUCGUGAUCGGCAUUGUGAACAAUACCGUGUACGACCCUCUGCA |
| | | GCCCGAGCUGGACAGCUUCAAAGAGGAACUGGACAAGUACUUUAAGAACCACACAAGCCCCGACGUGGACCUGGG |
| | | CGAUAUCAGCGGAAUCAACGCCAGCGUCGUGAACAUCCAGAAAGAGAUCGACCGGCUGAACGAGGUGGCCAAGAA |
| | | UCUGAACGAGAGCCUGAUCGACCUGCAAGAACUGGGGAAGUACGAGCAGUACAUCAAGUGGCCCUGGUACAUCUG |
| | | GCUGGGCUUUAUCGCCGGACUGAUUGCCAUCGUGAUGGUCACAAUCAUGCUGUGUUGCAUGACCAGCUGCUGUA |
| | | GCUGCCUGAAGGGCUGUUGUAGCUGUGGCAGCUGCUGCAAGUUCGACGAGGACGAUUCUGAGCCCGUGCUGAAG |
| | | GGCGUGAAACUGCACUACACA |
| 133 | 2A4361 | AUGGGAGUCAAAGUUCUGUUUGCCCUGAUCUGCAUUGCUGUGGCCGAGGCCAAGAGAGUCCAACCAACAGAAUCU |
| | | AUUGUUAGAUUUCCUAAUAUUACAAACUUGUGCCCUUUUGGUGAAGUUUUUAACGCCACCAGAUUUGCAUCCGUG |
| | | UAUGCUUGGAACAGGAAGAGAAUCAGCAACUGUGUUGCUGAUUAUUCUGUCCUAUAUAAUUCCGCAUCAUUUUCC |
| | | ACUUUUAAGUGUUAUGGAGUGUCUCCUACUAAAUUAAAUGAUCUCUGCUUUACUAAUGUCUAUGCAGAUUCAUUU |
| | | GUAAUUAGAGGUGAUGAAGUCAGACAAAUCGCUCCAGGGCAAACUGGAAAGAUUGCUGAUUAUAAUUAUAAAUUAC |
| | | CAGAUGAUUUUACAGGCUGCGUUAUAGCUUGGAAUUCUAACAAUCUUGAUUCUAAGGUUGGUGGUAAUUAUAAUU |
| | | ACCUGUAUAGAUUGUUUAGGAAGUCUAAUCUCAAACCUUUUGAGAGAGAUAUUUCAACUGAAAUCUAUCAGGCCG |
| | | GUAGCACACCUUGUAAUGGUGUUGAAGGUUUUAAUUGUUACUUUCCUUUACAAUCAUAUGGUUUCCAACCCACUA |
| | | AUGGUGUUGGUUACCAACCAUACAGAGUAGUAGUACUUUCUUUUGAACUUCUACAUGCACCAGCAACUGUUUGUG |
| | | GACCUAAAAAGUCUACUAAUUUGGUUAAAAACAAAUGUGUCAAUUUCGGAAGCGGCAGGCUGAGACGAGGCAGCG |
| | | GCGCCACCAACUUCAGCCUGUUGAAGCAGGCCGGCGACGUGGAGGAAAACCCCGGCCCCAUGGGAGUCAAAGUU |
| | | CUGUUUGCCCUGAUCUGCAUUGCUGUGGCCGAGGCCAAGAGAGUCCAACCAACAGAAUCUAUUGUUAGAUUUCCU |
| | | AAUAUUACAAACUUGUGCCCUUUUGGUGAAGUUUUUAACGCCACCAGAUUUGCAUCCGUGUAUGCUUGGAACAGG |
| | | AAGAGAAUCAGCAACUGUGUUGCUGAUUAUUCUGUCCUAUAUAAUUCCGCAUCAUUUUCCACUUUUAAGUGUUAU |
| | | GGAGUGUCUCCUACUAAAUUAAAUGAUCUCUGCUUUACUAAUGUCUAUGCAGAUUCAUUUGUAAUUAGAGGUGAU |
| | | GAAGUCAGACAAAUCGCUCCAGGGCAAACUGGAAAGAUUGCUGAUUAUAAUUAUAAAUUACCAGAUGAUUUUACAG |
| | | GCUGCGUUAUAGCUUGGAAUUCUAACAAUCUUGAUUCUAAGGUUGGUGGUAAUUAUAAUUACCUGUAUAGAUUGU |
| | | UUAGGAAGUCUAAUCUCAAACCUUUUGAGAGAGAUAUUUCAACUGAAAUCUAUCAGGCCGGUAGCACACCUUGUA |
| | | AUGGUGUUGAAGGUUUUAAUUGUUACUUUCCUUUACAAUCAUAUGGUUUCCAACCCACUAAUGGUGUUGGUUACC |
| | | AACCAUACAGAGUAGUAGUACUUUCUUUUGAACUUCUACAUGCACCAGCAACUGUUUGUGGACCUAAAAAGUCUAC |
| | | UAAUUUGGUUAAAAACAAAUGUGUCAAUUUC |
| 134 | 2A5361 | AUGGGAGUCAAAGUUCUGUUUGCCCUGAUCUGCAUUGCUGUGGCCGAGGCCAAGAGAGUCCAACCAACAGAAUCU |
| | | AUUGUUAGAUUUCCUAAUAUUACAAACUUGUGCCCUUUUGGUGAAGUUUUUAACGCCACCAGAUUUGCAUCCGUG |
| | | UAUGCUUGGAACAGGAAGAGAAUCAGCAACUGUGUUGCUGAUUAUUCUGUCCUAUAUAAUUCCGCAUCAUUUUCC |
| | | ACUUUUAAGUGUUAUGGAGUGUCUCCUACUAAAUUAAAUGAUCUCUGCUUUACUAAUGUCUAUGCAGAUUCAUUU |
| | | GUAAUUAGAGGUGAUGAAGUCAGACAAAUCGCUCCAGGGCAAACUGGAAAGAUUGCUGAUUAUAAUUAUAAAUUAC |
| | | CAGAUGAUUUUACAGGCUGCGUUAUAGCUUGGAAUUCUAACAAUCUUGAUUCUAAGGUUGGUGGUAAUUAUAAUU |
| | | ACCUGUAUAGAUUGUUUAGGAAGUCUAAUCUCAAACCUUUUGAGAGAGAUAUUUCAACUGAAAUCUAUCAGGCCG |
| | | GUAGCACACCUUGUAAUGGUGUUGAAGGUUUUAAUUGUUACUUUCCUUUACAAUCAUAUGGUUUCCAACCCACUA |
| | | AUGGUGUUGGUUACCAACCAUACAGAGUAGUAGUACUUUUUUUGAACUUCUACAUGCACCAGCAACUGUUUGUG |
| | | GACCUAAAAAGUCUACUAAUUUGGUUAAAAACAAAUGUGUCAAUUUCGGAAGCGGCAGGCUGAGACGAGGCAGCG |
| | | GCGCCACCAACUUCAGCCUGUUGAAGCAGGCCGGCGACGUGGAGGAAAACCCCGGCCCCAUGGGAGUCAAAGUU |
| | | CUGUUUGCCCUGAUCUGCAUUGCUGUGGCCGAGGCCAAGAGAGUCCAACCAACAGAAUCUAUUGUUAGAUUUCCU |
| | | AAUAUUACAAACUUGUGCCCUUUUGGUGAAGUUUUUAACGCCACCAGAUUUGCAUCCGUGUAUGCUUGGAACAGG |
| | | AAGAGAAUCAGCAACUGUGUUGCUGAUUAUUCUGUCCUAUAUAAUUCCGCAUCAUUUUCCACUUUUAAGUGUUAU |
| | | GGAGUGUCUCCUACUAAAUUAAAUGAUCUCUGCUUUACUAAUGUCUAUGCAGAUUCAUUUGUAAUUAGAGGUGAU |
| | | GAAGUCAGACAAAUCGCUCCAGGGCAAACUGGAAAGAUUGCUGAUUAUAAUUAUAAAUUACCAGAUGAUUUUACAG |
| | | GCUGCGUUAUAGCUUGGAAUUCUAACAAUCUUGAUUCUAAGGUUGGUGGUAAUUAUAAUUACCUGUAUAGAUUGU |
| | | UUAGGAAGUCUAAUCUCAAACCUUUUGAGAGAGAUAUUUCAACUGAAAUCUAUCAGGCCGGUAGCACACCUUGUA |
| | | AUGGUGUUGAAGGUUUUAAUUGUUACUUUCCUUUACAAUCAUAUGGUUUCCAACCCACUAAUGGUGUUGGUUACC |
| | | AACCAUACAGAGUAGUAGUACUUUCUUUUGAACUUCUACAUGCACCAGCAACUGUUUGUGGACCUAAAAAGUCUAC |
| | | UAAUUUGGUUAAAAACAAAUGUGUCAAUUUCGGAAGCGGCAGGCUGAGACGAGGCAGCGGCGCCACCAACUUCAG |
| | | CCUGUUGAAGCAGGCCGGCGACGUGGAGGAAAACCCCGGCCCCAUGGGAGUCAAAGUUCUGUUUGCCCUGAUCU |
| | | GCAUUGCUGUGGCCGAGGCCAAGAGAGUCCAACCAACAGAAUCUAUUGUUAGAUUUCCUAAUAUUACAAACUUGU |
| | | GCCCUUUUGGUGAAGUUUUUAACGCCACCAGAUUUGCAUCCGUGUAUGCUUGGAACAGGAAGAGAAUCAGCAACU |
| | | GUGUUGCUGAUUAUUCUGUCCUAUAUAAUUCCGCAUCAUUUUCCACUUUUAAGUGUUAUGGAGUGUCUCCUACUA |
| | | AAUUAAAUGAUCUCUGCUUUACUAAUGUCUAUGCAGAUUCAUUUGUAAUUAGAGGUGAUGAAGUCAGACAAAUCG |
| | | CUCCAGGGCAAACUGGAAAGAUUGCUGAUUAUAAUUAUAAAUUACCAGAUGAUUUUACAGGCUGCGUUAUAGCUU |
| | | GGAAUUCUAACAAUCUUGAUUCUAAGGUUGGUGGUAAUUAUAAUUACCUGUAUAGAUUGUUUAGGAAGUCUAAUC |
| | | UCAAACCUUUUGAGAGAGAUAUUUCAACUGAAAUCUAUCAGGCCGGUAGCACACCUUGUAAUGGUGUUGAAGGUU |
| | | UUAAUUGUUACUUUCCUUUACAAUCAUAUGGUUUCCAACCCACUAAUGGUGUUGGUUACCAACCAUACAGAGUAG |
| | | UAGUACUUUCUUUUGAACUUCUACAUGCACCAGCAACUGUUUGUGGACCUAAAAAGUCUACUAAUUUGGUUAAAAA |
| | | CAAAUGUGUCAAUUUC |
| 135 | 2A3461 | AUGGGAGUCAAAGUUCUGUUUGCCCUGAUCUGCAUUGCUGUGGCCGAGGCCAAGAGAGUCCAACCAACAGAAUCU |
| | | AUUGUUAGAUUUCCUAAUAUUACAAACUUGUGCCCUUUUGGUGAAGUUUUUAACGCCACCAGAUUUGCAUCCGUG |
| | | UAUGCUUGGAACAGGAAGAGAAUCAGCAACUGUGUUGCUGAUUAUUCUGUCCUAUAUAAUUCCGCAUCAUUUUCC |
| | | ACUUUUAAGUGUUAUGGAGUGUCUCCUACUAAAUUAAAUGAUCUCUGCUUUACUAAUGUCUAUGCAGAUUCAUUU |
| | | GUAAUUAGAGGUGAUGAAGUCAGACAAAUCGCUCCAGGGCAAACUGGAAAGAUUGCUGAUUAUAAUUAUAAAUUAC |
| | | CAGAUGAUUUUACAGGCUGCGUUAUAGCUUGGAAUUCUAACAAUCUUGAUUCUAAGGUUGGUGGUAAUUAUAAUU |
| | | ACCUGUAUAGAUUGUUUAGGAAGUCUAAUCUCAAACCUUUUGAGAGAGAUAUUUCAACUGAAAUCUAUCAGGCCG |
| | | GUAGCACACCUUGUAAUGGUGUUGAAGGUUUUAAUUGUUACUUUCCUUUACAAUCAUAUGGUUUCCAACCCACUA |
| | | AUGGUGUUGGUUACCAACCAUACAGAGUAGUAGUACUUUCUUUUGAACUUCUACAUGCACCAGCAACUGUUUGUG |
| | | GACCUAAAAAGUCUACUAAUUUGGUUAAAAACAAAUGUGUCAAUUUCGGAAGCGGCAGGCUGAGACGAGGCAGCG |
| | | GCGCCACCAACUUCAGCCUGUUGAAGCAGGCCGGCGACGUGGAGGAAAACCCCGGCCCCAGAGUCCAACCAACAG |
| | | AAUCUAUUGUUAGAUUUCCUAAUAUUACAAACUUGUGCCCUUUUGGUGAAGUUUUUAACGCCACCAGAUUUGCAU |
| | | CCGUGUAUGCUUGGAACAGGAAGAGAAUCAGCAACUGUGUUGCUGAUUAUUCUGUCCUAUAUAAUUCCGCAUCAU |
| | | UUUCCACUUUUAAGUGUUAUGGAGUGUCUCCUACUAAAUUAAAUGAUCUCUGCUUUACUAAUGUCUAUGCAGAUU |
| | | CAUUUGUAAUUAGAGGUGAUGAAGUCAGACAAAUCGCUCCAGGGCAAACUGGAAAGAUUGCUGAUUAUAAUUAUA |
| | | AAUUACCAGAUGAUUUUACAGGCUGCGUUAUAGCUUGGAAUUCUAACAAUCUUGAUUCUAAGGUUGGUGGUAAUU |
| | | AUAAUUACCUGUAUAGAUUGUUUAGGAAGUCUAAUCUCAAACCUUUUGAGAGAGAUAUUUCAACUGAAAUCUAUCA |
| | | GGCCGGUAGCACACCUUGUAAUGGUGUUGAAGGUUUUAAUUGUUACUUUCCUUUACAAUCAUAUGGUUUCCAACC |
| | | CACUAAUGGUGUUGGUUACCAACCAUACAGAGUAGUAGUACUUUUUUUGAACUUCUACAUGCACCAGCAACUGU |
| | | UUGUGGACCUAAAAAGUCUACUAAUUUGGUUAAAAACAAAUGUGUCAAUUUC |
| 136 | 2A4461 | AUGGGAGUCAAAGUUCUGUUUGCCCUGAUCUGCAUUGCUGUGGCCGAGGCCAAGAGAGUCCAACCAACAGAAUCU |
| | | AUUGUUAGAUUUCCUAAUAUUACAAACUUGUGCCCUUUUGGUGAAGUUUUUAACGCCACCAGAUUUGCAUCCGUG |
| | | UAUGCUUGGAACAGGAAGAGAAUCAGCAACUGUGUUGCUGAUUAUUCUGUCCUAUAUAAUUCCGCAUCAUUUUCC |
| | | ACUUUUAAGUGUUAUGGAGUGUCUCCUACUAAAUUAAAUGAUCUCUGCUUUACUAAUGUCUAUGCAGAUUCAUUU |
| | | GUAAUUAGAGGUGAUGAAGUCAGACAAAUCGCUCCAGGGCAAACUGGAAAGAUUGCUGAUUAUAAUUAUAAAUUAC |
| | | CAGAUGAUUUUACAGGCUGCGUUAUAGCUUGGAAUUCUAACAAUCUUGAUUCUAAGGUUGGUGGUAAUUAUAAUU |
| | | ACCUGUAUAGAUUGUUUAGGAAGUCUAAUCUCAAACCUUUUGAGAGAGAUAUUUCAACUGAAAUCUAUCAGGCCG |
| | | GUAGCACACCUUGUAAUGGUGUUGAAGGUUUUAAUUGUUACUUUCCUUUACAAUCAUAUGGUUUCCAACCCACUA |
| | | AUGGUGUUGGUUACCAACCAUACAGAGUAGUAGUACUUUCUUUUGAACUUCUACAUGCACCAGCAACUGUUUGUG |
| | | GACCUAAAAAGUCUACUAAUUUGGUUAAAAACAAAUGUGUCAAUUUCGGAAGCGGCAGGCUGAGACGAGGCAGCG |
| | | GCGCCACCAACUUCAGCCUGUUGAAGCAGGCCGGCGACGUGGAGGAAAACCCCGGCCCCAGAGUCCAACCAACAG |
| | | AAUCUAUUGUUAGAUUUCCUAAUAUUACAAACUUGUGCCCUUUUGGUGAAGUUUUUAACGCCACCAGAUUUGCAU |
| | | CCGUGUAUGCUUGGAACAGGAAGAGAAUCAGCAACUGUGUUGCUGAUUAUUCUGUCCUAUAUAAUUCCGCAUCAU |
| | | UUUCCACUUUUAAGUGUUAUGGAGUGUCUCCUACUAAAUUAAAUGAUCUCUGCUUUACUAAUGUCUAUGCAGAUU |
| | | CAUUUGUAAUUAGAGGUGAUGAAGUCAGACAAAUCGCUCCAGGGCAAACUGGAAAGAUUGCUGAUUAUAAUUAUA |
| | | AAUUACCAGAUGAUUUUACAGGCUGCGUUAUAGCUUGGAAUUCUAACAAUCUUGAUUCUAAGGUUGGUGGUAAUU |
| | | AUAAUUACCUGUAUAGAUUGUUUAGGAAGUCUAAUCUCAAACCUUUUGAGAGAGAUAUUUCAACUGAAAUCUAUCA |
| | | GGCCGGUAGCACACCUUGUAAUGGUGUUGAAGGUUUUAAUUGUUACUUUCCUUUACAAUCAUAUGGUUUCCAACC |
| | | CACUAAUGGUGUUGGUUACCAACCAUACAGAGUAGUAGUACUUUCUUUUGAACUUCUACAUGCACCAGCAACUGU |
| | | UUGUGGACCUAAAAAGUCUACUAAUUUGGUUAAAAACAAAUGUGUCAAUUUCGGAAGCGGCAGGCUGAGACGAGG |
| | | CAGCGGCGCCACCAACUUCAGCCUGUUGAAGCAGGCCGGCGACGUGGAGGAAAACCCCGGCCCCAGAGUCCAAC |
| | | CAACAGAAUCUAUUGUUAGAUUUCCUAAUAUUACAAACUUGUGCCCUUUUGGUGAAGUUUUUAACGCCACCAGAU |
| | | UUGCAUCCGUGUAUGCUUGGAACAGGAAGAGAAUCAGCAACUGUGUUGCUGAUUAUUCUGUCCUAUAUAAUUCCG |
| | | CAUCAUUUUCCACUUUUAAGUGUUAUGGAGUGUCUCCUACUAAAUUAAAUGAUCUCUGCUUUACUAAUGUCUAUG |
| | | CAGAUUCAUUUGUAAUUAGAGGUGAUGAAGUCAGACAAAUCGCUCCAGGGCAAACUGGAAAGAUUGCUGAUUAUA |
| | | AUUAUAAAUUACCAGAUGAUUUUACAGGCUGCGUUAUAGCUUGGAAUUCUAACAAUCUUGAUUCUAAGGUUGGUG |
| | | GUAAUUAUAAUUACCUGUAUAGAUUGUUUAGGAAGUCUAAUCUCAAACCUUUUGAGAGAGAUAUUUCAACUGAAAU |
| | | CUAUCAGGCCGGUAGCACACCUUGUAAUGGUGUUGAAGGUUUUAAUUGUUACUUUCCUUUACAAUCAUAUGGUUU |
| | | CCAACCCACUAAUGGUGUUGGUUACCAACCAUACAGAGUAGUAGUACUUUCUUUUGAACUUCUACAUGCACCAGC |
| | | AACUGUUUGUGGACCUAAAAAGUCUACUAAUUUGGUUAAAAACAAAUGUGUCAAUUUC |
| 137 | 2A5461 | AUGGGAGUCAAAGUUCUGUUUGCCCUGAUCUGCAUUGCUGUGGCCGAGGCCAAGAGAGUCCAACCAACAGAAUCU |
| | | AUUGUUAGAUUUCCUAAUAUUACAAACUUGUGCCCUUUUGGUGAAGUUUUUAACGCCACCAGAUUUGCAUCCGUG |
| | | UAUGCUUGGAACAGGAAGAGAAUCAGCAACUGUGUUGCUGAUUAUUCUGUCCUAUAUAAUUCCGCAUCAUUUUCC |
| | | ACUUUUAAGUGUUAUGGAGUGUCUCCUACUAAAUUAAAUGAUCUCUGCUUUACUAAUGUCUAUGCAGAUUCAUUU |
| | | GUAAUUAGAGGUGAUGAAGUCAGACAAAUCGCUCCAGGGCAAACUGGAAAGAUUGCUGAUUAUAAUUAUAAAUUAC |
| | | CAGAUGAUUUUACAGGCUGCGUUAUAGCUUGGAAUUCUAACAAUCUUGAUUCUAAGGUUGGUGGUAAUUAUAAUU |
| | | ACCUGUAUAGAUUGUUUAGGAAGUCUAAUCUCAAACCUUUUGAGAGAGAUAUUUCAACUGAAAUCUAUCAGGCCG |
| | | GUAGCACACCUUGUAAUGGUGUUGAAGGUUUUAAUUGUUACUUUCCUUUACAAUCAUAUGGUUUCCAACCCACUA |
| | | AUGGUGUUGGUUACCAACCAUACAGAGUAGUAGUACUUUCUUUUGAACUUCUACAUGCACCAGCAACUGUUUGUG |
| | | GACCUAAAAAGUCUACUAAUUUGGUUAAAAACAAAUGUGUCAAUUUCGGAAGCGGCAGGCUGAGACGAGGCAGCG |
| | | GCGCCACCAACUUCAGCCUGUUGAAGCAGGCCGGCGACGUGGAGGAAAACCCCGGCCCCGGCCUCGAACAACUC |
| | | GAAAGCAUUAUCAAUUUUGAAAAACUCACAGAAUGGACCAGUGGACUCGAGCAACUCGAGAGUAUCAUUAAUUUCG |
| | | AAAAGCUCACAGAGUGGACAAGCGGCCUGGAGCAGCUGGAGAGCAUCAUAAACUUCGAGAAGCUGACCGAGUGGA |
| | | CCAGC |
| 138 | 2A6461 | AUGGGAGUCAAAGUUCUGUUUGCCCUGAUCUGCAUUGCUGUGGCCGAGGCCAAGAGAGUCCAACCAACAGAAUCU |
| | | AUUGUUAGAUUUCCUAAUAUUACAAACUUGUGCCCUUUUGGUGAAGUUUUUAACGCCACCAGAUUUGCAUCCGUG |
| | | UAUGCUUGGAACAGGAAGAGAAUCAGCAACUGUGUUGCUGAUUAUUCUGUCCUAUAUAAUUCCGCAUCAUUUUCC |
| | | ACUUUUAAGUGUUAUGGAGUGUCUCCUACUAAAUUAAAUGAUCUCUGCUUUACUAAUGUCUAUGCAGAUUCAUUU |
| | | GUAAUUAGAGGUGAUGAAGUCAGACAAAUCGCUCCAGGGCAAACUGGAAAGAUUGCUGAUUAUAAUUAUAAAUUAC |
| | | CAGAUGAUUUUACAGGCUGCGUUAUAGCUUGGAAUUCUAACAAUCUUGAUUCUAAGGUUGGUGGUAAUUAUAAUU |
| | | ACCUGUAUAGAUUGUUUAGGAAGUCUAAUCUCAAACCUUUUGAGAGAGAUAUUUCAACUGAAAUCUAUCAGGCCG |
| | | GUAGCACACCUUGUAAUGGUGUUGAAGGUUUUAAUUGUUACUUUCCUUUACAAUCAUAUGGUUUCCAACCCACUA |
| | | AUGGUGUUGGUUACCAACCAUACAGAGUAGUAGUACUUUCUUUUGAACUUCUACAUGCACCAGCAACUGUUUGUG |
| | | GACCUAAAAAGUCUACUAAUUUGGUUAAAAACAAAUGUGUCAAUUUCCGGCGGAAGCGGAGAAGCGGCAGCGGCG |
| | | CCACCAACUUCAGCCUGUUGAAGCAGGCCGGCGACGUGGAGGAAAACCCCGGCCCCAUGGGAGUCAAAGUUCUG |
| | | UUUGCCCUGAUCUGCAUUGCUGUGGCCGAGGCCAAGAGAGUCCAACCAACAGAAUCUAUUGUUAGAUUUCCUAAU |
| | | AUUACAAACUUGUGCCCUUUUGGUGAAGUUUUUAACGCCACCAGAUUUGCAUCCGUGUAUGCUUGGAACAGGAAG |
| | | AGAAUCAGCAACUGUGUUGCUGAUUAUUCUGUCCUAUAUAAUUCCGCAUCAUUUUCCACUUUUAAGUGUUAUGGA |
| | | GUGUCUCCUACUAAAUUAAAUGAUCUCUGCUUUACUAAUGUCUAUGCAGAUUCAUUUGUAAUUAGAGGUGAUGAA |
| | | GUCAGACAAAUCGCUCCAGGGCAAACUGGAAAGAUUGCUGAUUAUAAUUAUAAAUUACCAGAUGAUUUUACAGGCU |
| | | GCGUUAUAGCUUGGAAUUCUAACAAUCUUGAUUCUAAGGUUGGUGGUAAUUAUAAUUACCUGUAUAGAUUGUUUA |
| | | GGAAGUCUAAUCUCAAACCUUUUGAGAGAGAUAUUUCAACUGAAAUCUAUCAGGCCGGUAGCACACCUUGUAAUG |
| | | GUGUUGAAGGUUUUAAUUGUUACUUUCCUUUACAAUCAUAUGGUUUCCAACCCACUAAUGGUGUUGGUUACCAAC |
| | | CAUACAGAGUAGUAGUACUUUCUUUUGAACUUCUACAUGCACCAGCAACUGUUUGUGGACCUAAAAAGUCUACUAA |
| | | UUUGGUUAAAAACAAAUGUGUCAAUUUC |
| 139 | 2A6481 | AUAGGUCUCACAUGUUUGUUUUCUUAGUUUUAUUACCUUUAGUUUCUUCCCAGUGUGUUAAUUUAACUACUAGAA |
| | | CUCAAUUACCUCCUGCUUAUACUAAUUCUUUUACUAGAGGAGUGUAUUAUCCUGAUAAGGUUUUUAGAUCUUCUG |
| | | UUCUGCACUCUACUCAGGAUUUGUUCUUGCCCUUCUUCUCUAACGUGACCUGGUUCCACGCUAUUCACGUUUCU |
| | | GGAACCAACGGCACUAAGAGAUUUGAUAAUCCCGUUUUGCCUUUUAACGACGGAGUUUAUUUCGCCUCUACCGAA |
| | | AAAUCUAACAUCAUUAGGGGCUGGAUCUUUGGAACUACCCUGGAUUCUAAAACUCAAUCUUUAUUGAUUGUGAAU |
| | | AACGCUACCAACGUUGUGAUUAAAGUUUGUGAAUUUCAAUUUUGUAACGAUCCUUUUCUGGGAGUUUAUUAUCAU |
| | | AAAAACAAUAAAUCUUGGAUGGAAUCUGAAUUCCGCGUUUAUUCUUCUGCCAAUAACUGUACCUUUGAGUACGUU |
| | | UCUCAACCUUUCUUAAUGGAUUUAGAAGGAAAACAAGGCAAUUUCAAAAACUUAAGAGAAUUUGUUUUUAAAAAUA |
| | | UUGACGGAUAUUUUAAAAUUUAUUCUAAGCAUACUCCUAUUAAUUUAGUGAGAGACUUACCCCAAGGAUUUUCUGC |
| | | UUUAGAACCUUUAGUUGACUUACCUAUUGGAAUCAAUAUCACUAGAUUUCAAACUUUAUUAGCUUUACAUAGAUCU |
| | | UAUUUAACUCCUGGAGAUUCUUCCUCCGGCUGGACAGCCGGAGCCGCUGCUUAUUACGUUGGAUAUUUACAGCC |
| | | UAGAACUUUUCUGCUGAAAUAUAACGAAAACGGAACCAUUACCGACGCCGUUGACUGUGCUCUGGAUCCUUUAUC |
| | | UGAAACCAAGUGUACUUUAAAAUCUUUUACCGUUGAAAAAGGAAUUUAUCAAACUUCUAAUUUUAGAGUUCAACCU |
| | | ACUGAAUCUAUCGUUAGAUUCCCUAAUAUUACUAAUUUGUGUCCCUUUGGAGAGGUUUUCAACGCUACUAGAUUU |
| | | GCCUCUGUUUACGCUUGGAAUCGCAAGAGAAUUUCUAAUUGUGUGGCCGAUUACUCCGUUUUGUAUAACUCUGCU |
| | | UCUUUCUCUACUUUUAAGUGUUACGGAGUUUCCCCUACUAAACUGAACGAUUUGUGUUUUACUAACGUUUACGCU |
| | | GAUUCUUUUGUUAUUAGAGGCGACGAAGUUAGACAAAUUGCUCCUGGACAAACUGGAAAGAUUGCUGACUAUAAC |
| | | UAUAAACUGCCUGACGAUUUUACCGGCUGUGUUAUUGCUUGGAAUUCUAAUAAUUUAGAUUCUAAAGUUGGAGGA |
| | | AAUUAUAAUUAUUUAUAUAGAUUAUUUAGAAAAUCUAAUUUAAAACCUUUUGAAAGAGAUAUUUCCACUGAGAUUUA |
| | | CCAGGCUGGAUCUACUCCUUGUAACGGCGUUGAGGGAUUUAAUUGUUAUUUUCCUUUACAAUCUUACGGAUUUCA |
| | | ACCUACCAACGGAGUUGGAUAUCAACCUUACAGAGUUGUGGUGCUGUCUUUUGAAUUAUUACACGCUCCCGCUAC |
| | | UGUUUGCGGCCCUAAAAAGUCUACUAAUCUGGUUAAGAAUAAGUGUGUGAAUUUUAAUUUCAACGGAUUGACCGG |
| | | AACUGGAGUUCUGACUGAAUCUAAUAAAAAAUUUUUACCCUUUCAACAAUUUGGAAGGGAUAUCGCUGAUACUACU |
| | | GACGCUGUUAGAGAUCCUCAAACUUUAGAAAUCCUGGAUAUUACUCCUUGUUCUUUUGGAGGAGUUUCCGUUAUU |
| | | ACUCCUGGCACUAAUACUUCUAAUCAAGUUGCUGUUUUAUAUCAAGACGUUAAUUGCACCGAAGUUCCUGUUGCU |
| | | AUUCACGCUGAUCAGUUAACUCCUACUUGGAGAGUUUAUUCUACUGGAUCUAACGUUUUUCAAACCAGAGCUGGC |
| | | UGUUUAAUCGGAGCUGAACACGUGAAUAAUUCUUACGAGUGCGAUAUUCCCAUCGGAGCUGGAAUUUGUGCCUCU |
| | | UAUCAAACUCAAACCAAUUCUCCUAGGAGGGCUAGAUCCGUUGCCUCUCAAUCUAUUAUUGCUUAUACCAUGUCU |
| | | UUAGGAGCUGAAAAUUCCGUUGCUUACUCUAACAAUUCUAUUGCUAUUCCUACUAACUUUACUAUUUCUGUUACUA |
| | | CUGAAAUUCUGCCCGUGUCCAUGACUAAAACUUCUGUUGAUUGUACUAUGUAUAUUUGUGGAGAUUCCACUGAGU |
| | | GUUCUAACCUGUUAUUACAAUACGGAUCUUUUUGUACUCAAUUAAAUAGAGCUCUGACUGGAAUUGCUGUUGAAC |
| | | AGGACAAAAAUACUCAAGAAGUUUUUGCCCAAGUUAAACAGAUUUAUAAAACUCCUCCUAUUAAAGAUUUUGGAGG |
| | | AUUUAAUUUCUCUCAAAUUUUACCUGACCCUUCUAAGCCUUCCAAAAGGUCUUUCAUCGAAGAUUUAUUAUUUAAU |
| | | AAAGUUACCUUAGCCGACGCUGGAUUUAUUAAGCAAUACGGAGAUUGCUUAGGCGAUAUCGCUGCUAGAGACUUA |
| | | AUUUGUGCUCAAAAAUUUAACGGAUUAACUGUUUUACCUCCCCUGUUAACUGACGAAAUGAUCGCUCAAUAUACUU |
| | | CUGCUCUGUUAGCUGGAACUAUUACUUCUGGCUGGACUUUUGGAGCUGGAGCUGCUUUACAAAUUCCCUUUGCU |
| | | AUGCAGAUGGCUUAUAGAUUUAACGGAAUUGGAGUUACUCAAAACGUUUUAUACGAAAAUCAAAAAUUAAUUGCUA |
| | | AUCAAUUUAAUUCUGCUAUUGGAAAAAUUCAAGAUUCCCUGUCUUCUACUGCUUCCGCUCUGGGAAAAUUACAAGA |
| | | CGUUGUUAAUCAAAACGCUCAAGCUUUGAAUACCUUAGUUAAACAAUUAUCUUCCAAUUUUGGAGCUAUUUCUUCU |
| | | GUUUUAAACGACAUUUUAUCUAGAUUAGAUCCCCCUGAAGCUGAAGUUCAGAUUGACAGAUUGAUUACCGGAAGA |
| | | UUACAAUCUUUACAAACUUACGUUACUCAACAACUGAUUAGAGCUGCUGAAAUUAGAGCCUCUGCUAAUUUAGCUG |
| | | CUACUAAGAUGUCUGAGUGUGUUUUAGGACAGUCCAAAAGAGUUGAUUUUUGUGGAAAAGGCUAUCAUCUGAUGU |
| | | CUUUUCCUCAAUCUGCUCCUCACGGAGUUGUGUUUUUACACGUUACUUACGUUCCUGCUCAAGAGAAGAAUUUUA |
| | | CUACUGCUCCUGCUAUUUGUCACGACGGAAAAGCUCAUUUUCCUAGAGAAGGAGUUUUUGUUUCUAACGGAACUC |
| | | AUUGGUUUGUUACUCAAAGAAACUUUUACGAACCUCAGAUUAUUACCACUGAUAAUACCUUUGUUUCUGGCAAUU |
| | | GUGACGUGGUUAUUGGAAUUGUUAAUAAUACUGUUUACGAUCCUUUACAACCCGAACUGGAUUCUUUUAAAGAAG |
| | | AAUUAGAUAAAUACUUUAAAAAUCAUACUUCUCCCGACGUUGAUUUAGGAGAUAUCUCUGGAAUUAACGCUUCUGU |
| | | UGUGAAUAUUCAAAAGGAAAUUGAUAGAUUAAACGAAGUGGCUAAAAAUUUAAACGAGUCUUUAAUUGAUUUACAG |
| | | GAACUGGGAAAAUACGAACAAUAUAUUAAGUGGCCUUGGUACAUUUGGUUAGGCUUUAUUGCUGGACUGAUUGCU |
| | | AUUGUGAUGGUUACUAUCAUGUUGUGUUGCAUGACUUCUUGUUGUUCCUGUUUAAAAGGCUGUUGCUCUUGUGG |
| | | AUCUUGUUGCAAAUUUGACGAAGACGAUUCUGAACCUGUUCUGAAAGGAGUUAAACUGCAUUAUACUUAAAUGAG |
| | | ACCAUA |
| 140 | 2A7481 | AUAGGUCUCACAUGUUCGUGUUCUUAGUGCUGUUACCCCUGGUUUCUUCUCAGUGUGUCAAUUUAACCACCAGAA |
| | | CCCAACUGCCUCCUGCCUAUACUAAUUCCUUUACCCGCGGAGUUUACUAUCCCGAUAAGGUUUUUCGCUCCUCUG |
| | | UUUUACACUCUACUCAGGACUUAUUCUUACCCUUCUUCUCCAACGUUACUUGGUUUCACGCCAUUCACGUUUCUG |
| | | GAACCAACGGAACUAAGAGAUUCGAUAAUCCUGUGUUACCUUUCAACGACGGAGUUUAUUUUGCUUCCACUGAAA |
| | | AAUCCAAUAUCAUUAGGGGCUGGAUCUUUGGAACCACUUUAGAUUCCAAGACUCAAUCUUUAUUAAUUGUGAAUAA |
| | | CGCCACCAACGUGGUUAUCAAAGUGUGUGAAUUCCAAUUUUGUAACGACCCUUUCUUAGGCGUGUAUUAUCACAA |
| | | AAAUAAUAAAUCUUGGAUGGAAUCUGAAUUUCGCGUUUACUCUUCCGCUAACAACUGCACUUUUGAGUACGUUUC |
| | | CCAGCCUUUUCUGAUGGAUCUGGAAGGCAAACAGGGAAAUUUUAAAAAUCUGAGAGAAUUUGUUUUUAAGAACAU |
| | | UGACGGAUAUUUCAAGAUCUAUUCUAAACACACUCCCAUCAAUUUGGUUAGAGAUUUACCUCAGGGCUUUUCUGC |
| | | UUUAGAACCUUUAGUUGACCUGCCUAUUGGAAUCAACAUUACUAGAUUUCAAACUCUGUUAGCUCUGCAUAGAUC |
| | | UUAUUUAACUCCUGGAGAUUCCUCCUCCGGCUGGACCGCCGGAGCUGCUGCUUAUUACGUUGGCUAUUUACAAC |
| | | CCAGAACUUUUCUGUUAAAAUAUAACGAAAACGGCACCAUCACUGACGCCGUGGAUUGUGCUUUAGAUCCCUUAU |
| | | CCGAAACUAAGUGUACUCUGAAAUCCUUCACUGUUGAAAAAGGAAUUUAUCAGACCUCUAAUUUUAGAGUGCAACC |
| | | UACCGAAUCUAUUGUUAGAUUUCCUAAUAUUACCAACUUGUGCCCUUUUGGCGAAGUUUUCAACGCUACUAGAUU |
| | | UGCUUCUGUUUACGCUUGGAAUAGAAAAAGAAUUUCUAACUGUGUGGCUGACUAUUCCGUGUUAUACAAUUCUGC |
| | | CUCUUUUUCUACUUUUAAGUGUUACGGAGUGUCUCCCACUAAACUGAACGAUUUGUGCUUUACCAACGUUUACGC |
| | | UGAUUCUUUUGUUAUUAGAGGCGACGAGGUUCGCCAGAUUGCCCCUGGCCAGACUGGCAAAAUUGCUGACUAUAA |
| | | CUAUAAAUUACCUGACGAUUUUACCGGCUGCGUUAUCGCUUGGAACUCUAAUAAUCUGGAUUCUAAAGUUGGAGG |
| | | AAACUACAAUUAUUUAUAUAGAUUAUUUAGAAAAUCUAAUUUAAAACCCUUCGAGAGGGAUAUCUCUACUGAAAUC |
| | | UACCAAGCUGGAUCUACUCCUUGCAACGGCGUUGAAGGAUUUAAUUGUUAUUUUCCUUUACAAUCUUACGGAUUC |
| | | CAACCUACUAACGGAGUUGGAUAUCAGCCUUAUAGAGUGGUGGUUUUAUCUUUCGAAUUAUUACACGCUCCCGCU |
| | | ACUGUGUGUGGACCCAAAAAGUCUACUAAUUUAGUUAAAAAUAAGUGUGUUAAUUUCAAUUUUAACGGACUCACUG |
| | | GCACUGGAGUGUUAACUGAAUCUAAUAAAAAGUUCUUACCUUUCCAACAGUUCGGACGCGACAUUGCCGACACCA |
| | | CUGACGCUGUGAGAGAUCCUCAAACCUUAGAGAUUCUGGAUAUUACCCCUUGUUCCUUUGGAGGCGUUUCCGUU |
| | | AUCACUCCCGGAACUAACACUUCUAAUCAGGUUGCCGUUUUAUAUCAGGACGUUAAUUGCACUGAAGUUCCUGUU |
| | | GCUAUUCACGCUGAUCAACUGACUCCUACUUGGAGAGUUUAUUCCACUGGAUCUAACGUUUUUCAGACUCGCGCC |
| | | GGCUGUUUAAUUGGAGCUGAACACGUGAACAACUCCUACGAGUGCGAUAUUCCUAUUGGCGCUGGCAUCUGUGC |
| | | UUCUUAUCAAACUCAAACUAAUUCUCCCAGGAGGGCUCGCUCUGUUGCUUCCCAAUCUAUCAUUGCUUAUACUAU |
| | | GUCCUUAGGCGCUGAAAAUUCUGUUGCUUAUUCCAACAAUUCUAUUGCUAUUCCCACCAAUUUUACUAUUUCUGU |
| | | GACUACUGAAAUUUUACCUGUUUCCAUGACUAAGACUUCUGUUGAUUGUACUAUGUAUAUCUGCGGAGAUUCUAC |
| | | UGAGUGUUCCAACCUCUUAUUACAGUACGGAUCUUUUUGCACUCAGUUAAAUAGAGCUCUGACUGGAAUCGCUGU |
| | | UGAACAAGACAAAAACACCCAAGAAGUGUUUGCUCAGGUGAAGCAAAUUUACAAGACACCUCCUAUUAAGGAUUUU |
| | | GGAGGAUUCAAUUUUUCCCAGAUUUUACCUGAUCCUUCUAAACCUUCUAAACGCUCCUUUAUUGAAGAUUUACUG |
| | | UUCAAUAAAGUGACUCUGGCUGACGCUGGCUUCAUCAAGCAAUACGGCGAUUGUUUAGGAGACAUCGCUGCUAGA |
| | | GACUUAAUUUGUGCUCAAAAAUUCAACGGACUGACUGUUCUGCCCCCUUUACUGACCGACGAGAUGAUCGCCCAA |
| | | UAUACUUCUGCCCUGUUAGCUGGCACCAUUACUUCUGGCUGGACCUUUGGAGCUGGCGCUGCUUUACAAAUUCC |
| | | UUUCGCCAUGCAGAUGGCUUAUCGCUUUAACGGAAUUGGCGUUACCCAAAACGUGUUAUACGAGAAUCAAAAAUU |
| | | AAUCGCCAAUCAAUUUAAUUCUGCUAUUGGCAAGAUUCAAGAUUCUUUAUCUUCUACUGCUUCCGCCCUGGGCAA |
| | | ACUGCAGGACGUUGUUAACCAGAACGCUCAAGCCCUGAACACUUUAGUGAAGCAACUGUCUUCUAACUUCGGCGC |
| | | UAUUUCUUCCGUUUUAAACGACAUUCUGUCUCGCUUAGAUCCCCCUGAGGCUGAGGUUCAAAUUGAUAGACUGAU |
| | | UACUGGAAGAUUACAGUCCCUGCAAACUUACGUUACUCAACAGUUAAUCAGAGCUGCUGAAAUCCGCGCUUCCGC |
| | | UAAUUUAGCUGCUACUAAAAUGUCUGAGUGUGUGUUAGGCCAGUCUAAGAGAGUUGACUUUUGUGGCAAGGGCU |
| | | AUCAUUUAAUGUCUUUUCCUCAGUCCGCUCCUCACGGCGUUGUGUUCUUACACGUGACUUACGUUCCCGCCCAAG |
| | | AGAAAAAUUUUACCACUGCUCCUGCUAUUUGUCACGACGGAAAAGCUCAUUUUCCUAGAGAAGGAGUGUUUGUUU |
| | | CUAACGGAACCCACUGGUUUGUGACUCAAAGAAACUUUUACGAACCCCAAAUUAUUACUACUGACAAUACUUUCGU |
| | | UUCCGGCAACUGUGACGUGGUGAUCGGAAUUGUUAAUAACACCGUUUACGAUCCCUUACAACCUGAAUUAGAUUC |
| | | UUUUAAAGAAGAAUUAGAUAAAUAUUUCAAAAAUCAUACUUCCCCUGACGUUGAUCUGGGAGAUAUUUCUGGAAUU |
| | | AACGCUUCUGUGGUGAACAUUCAAAAAGAGAUUGACAGAUUAAACGAAGUUGCUAAAAACCUGAACGAGUCCCUGA |
| | | UCGACCUGCAGGAACUGGGAAAAUACGAGCAGUAUAUUAAGUGGCCUUGGUAUAUUUGGUUAGGAUUUAUUGCUG |
| | | GAUUAAUUGCUAUUGUGAUGGUGACCAUUAUGUUGUGCUGUAUGACCUCUUGUUGUUCUUGCCUGAAGGGCUGC |
| | | UGUUCUUGUGGCUCUUGUUGCAAGUUUGACGAAGACGAUUCCGAACCCGUUUUAAAGGGAGUGAAACUGCAUUAU |
| | | ACUUAAAUGAGACCAUA |
| 141 | 2A8481 | AUAGGUCUCACAUGUUUGUUUUUCUGGUUUUAUUACCCUUAGUGUCCUCCCAGUGCGUGAACUUAACUACCCGCA |
| | | CUCAGCUGCCUCCUGCCUAUACCAACUCUUUCACUAGAGGCGUUUACUAUCCUGACAAAGUUUUUAGAUCUUCUG |
| | | UGCUGCAUUCCACUCAAGAUUUAUUCCUGCCCUUCUUUUCUAACGUUACUUGGUUUCACGCCAUCCACGUGUCUG |
| | | GCACCAACGGAACCAAACGCUUUGACAACCCUGUGUUACCUUUUAACGACGGAGUUUACUUCGCCUCCACUGAAA |
| | | AGUCCAAUAUUAUCCGGGGCUGGAUUUUCGGAACCACCUUAGAUUCUAAAACCCAGUCUCUGCUGAUUGUGAACA |
| | | ACGCCACUAACGUGGUUAUUAAAGUGUGCGAGUUUCAAUUUUGCAACGACCCUUUUCUGGGAGUUUAUUACCACA |
| | | AAAAUAACAAAUCUUGGAUGGAGUCUGAAUUUAGAGUGUAUUCUUCCGCCAAUAAUUGCACCUUCGAGUACGUUU |
| | | CCCAACCCUUUCUGAUGGACUUAGAAGGAAAGCAAGGCAAUUUCAAAAACCUGCGCGAAUUUGUGUUCAAAAAUAU |
| | | UGACGGCUAUUUCAAAAUUUACUCCAAGCAUACCCCUAUUAAUUUAGUGCGCGAUCUGCCUCAGGGCUUCUCUGC |
| | | CUUAGAGCCUUUAGUGGACCUGCCUAUUGGCAUUAAUAUUACUCGCUUUCAGACUUUACUGGCCCUGCAUAGAUC |
| | | UUAUUUAACUCCUGGAGACUCUUCUUCCGGCUGGACCGCUGGAGCCGCUGCCUACUACGUUGGCUAUCUGCAGC |
| | | CUAGAACUUUUUUAUUAAAGUACAACGAAAACGGAACCAUCACUGACGCUGUUGAUUGCGCCCUGGAUCCUUUAU |
| | | CUGAAACAAAGUGCACCCUGAAGUCCUUCACCGUUGAAAAGGGCAUUUACCAAACAUCCAAUUUUAGGGUUCAGC |
| | | CUACUGAAUCCAUCGUGCGCUUUCCCAACAUCACUAACUUGUGUCCCUUUGGCGAGGUGUUUAACGCCACUCGCU |
| | | UUGCCUCUGUGUACGCCUGGAACAGAAAGAGAAUUUCCAAUUGCGUGGCUGAUUAUUCUGUGCUGUAUAACUCCG |
| | | CUUCUUUCUCCACCUUUAAGUGUUACGGAGUGUCCCCUACUAAACUGAACGACUUGUGCUUCACCAACGUUUACG |
| | | CCGAUUCUUUUGUGAUUCGCGGCGACGAAGUUAGACAAAUCGCCCCCGGACAGACCGGAAAGAUCGCUGAUUACA |
| | | ACUAUAAGUUACCUGACGACUUCACCGGCUGCGUGAUUGCUUGGAAUUCUAAUAACUUAGACUCUAAAGUUGGAG |
| | | GCAACUACAAUUACCUGUAUAGAUUAUUCCGCAAAUCUAACCUGAAACCUUUUGAGAGAGACAUCUCCACCGAAAU |
| | | UUACCAAGCCGGCUCUACCCCCUGCAACGGAGUUGAAGGAUUUAAUUGCUACUUUCCCCUGCAGUCCUACGGAUU |
| | | CCAACCUACUAACGGCGUUGGAUACCAACCUUACAGAGUUGUGGUGCUGUCUUUUGAAUUAUUACACGCCCCUGC |
| | | CACCGUUUGUGGCCCUAAGAAAUCUACCAAUCUGGUUAAAAACAAGUGUGUGAAUUUUAAUUUUAACGGCCUGAC |
| | | CGGCACUGGCGUUUUAACCGAGUCUAACAAGAAGUUUCUGCCUUUCCAACAAUUUGGCAGAGACAUCGCCGACAC |
| | | CACCGACGCUGUGCGCGAUCCUCAAACCUUAGAAAUUUUAGAUAUUACUCCUUGCUCUUUCGGCGGCGUUUCCGU |
| | | UAUUACUCCUGGAACCAAUACCUCUAAUCAAGUGGCUGUGCUGUACCAGGACGUUAAUUGCACUGAAGUGCCUGU |
| | | GGCUAUUCACGCCGAUCAACUGACCCCCACUUGGAGAGUUUAUUCUACUGGAUCUAACGUGUUCCAAACUAGAGC |
| | | UGGCUGUCUGAUCGGCGCCGAGCACGUUAAUAAUUCUUACGAGUGUGAUAUCCCUAUUGGCGCUGGCAUUUGCG |
| | | CCUCUUACCAGACCCAGACCAACUCCCCCCGCAGAGCUAGAUCCGUGGCCUCUCAGUCCAUUAUUGCCUAUACUA |
| | | UGUCCUUAGGAGCCGAAAAUUCUGUGGCUUACUCCAACAAUUCUAUUGCCAUUCCCACUAAUUUUACUAUCUCUG |
| | | UGACUACCGAAAUCCUGCCCGUGUCCAUGACUAAGACCUCCGUGGACUGCACCAUGUAUAUCUGCGGAGACUCUA |
| | | CUGAGUGUUCCAACUUAUUACUGCAGUACGGCUCUUUCUGUACUCAGCUGAAUAGAGCCCUGACUGGAAUUGCUG |
| | | UGGAGCAAGACAAAAAUACCCAGGAGGUGUUCGCUCAGGUGAAACAAAUUUAUAAGACCCCUCCCAUCAAAGAUUU |
| | | UGGAGGCUUCAAUUUUUCUCAAAUUCUGCCCGACCCCUCCAAGCCUUCCAAAAGAUCCUUUAUUGAAGAUCUGCU |
| | | GUUCAAUAAGGUUACUUUAGCCGACGCCGGCUUCAUUAAGCAGUACGGAGAUUGUCUGGGCGAUAUUGCUGCCC |
| | | GCGACCUGAUUUGCGCUCAGAAGUUCAACGGAUUAACCGUUCUGCCUCCUCUGCUGACUGACGAGAUGAUUGCU |
| | | CAGUAUACUUCUGCCCUGCUGGCUGGAACUAUUACCUCUGGCUGGACCUUCGGCGCCGGAGCUGCUCUGCAAAU |
| | | UCCCUUCGCCAUGCAAAUGGCUUACAGAUUUAACGGCAUCGGAGUUACUCAAAACGUGCUGUACGAAAACCAAAAA |
| | | UUAAUUGCCAACCAGUUCAAUUCCGCUAUCGGCAAAAUUCAGGAUUCUCUGUCUUCUACUGCUUCCGCUUUAGGC |
| | | AAACUGCAAGACGUUGUUAACCAGAACGCCCAAGCUUUAAACACCCUGGUUAAGCAGCUGUCCUCUAAUUUUGGC |
| | | GCUAUCUCUUCUGUUCUGAACGACAUUUUAUCUAGACUGGACCCCCCUGAAGCCGAGGUGCAGAUUGAUAGAUUA |
| | | AUCACCGGAAGACUGCAAUCCCUGCAGACCUACGUUACCCAGCAAUUAAUCAGAGCCGCCGAGAUCAGAGCCUCU |
| | | GCCAACUUAGCUGCCACCAAAAUGUCCGAGUGUGUGCUGGGACAGUCCAAGCGCGUGGACUUCUGUGGAAAGGG |
| | | AUACCACCUGAUGUCUUUUCCUCAAUCUGCUCCCCACGGAGUUGUGUUUCUGCACGUUACUUACGUGCCUGCCCA |
| | | AGAGAAAAACUUUACUACCGCCCCCGCUAUUUGCCACGACGGCAAGGCUCACUUCCCUAGAGAAGGAGUUUUUGU |
| | | GUCUAACGGAACCCAUUGGUUUGUGACUCAAAGAAAUUUUUACGAGCCUCAAAUCAUUACCACCGAUAACACUUUU |
| | | GUUUCCGGCAAUUGUGACGUGGUGAUUGGAAUCGUUAACAACACCGUUUACGACCCUUUACAGCCCGAAUUAGAC |
| | | UCUUUUAAAGAGGAGUUAGAUAAAUAUUUUAAAAACCAUACCUCUCCCGACGUGGACCUGGGAGAUAUUUCCGGA |
| | | AUUAACGCUUCUGUUGUGAAUAUCCAGAAAGAGAUCGACAGAUUAAACGAGGUUGCUAAAAAUUUAAACGAAUCCC |
| | | UGAUUGACCUGCAGGAGCUGGGCAAAUACGAACAAUAUAUUAAGUGGCCUUGGUAUAUUUGGUUAGGCUUCAUCG |
| | | CUGGAUUAAUCGCUAUUGUUAUGGUGACUAUUAUGUUGUGUUGUAUGACUUCCUGCUGUUCUUGCUUAAAAGGC |
| | | UGCUGUUCCUGCGGAUCCUGUUGUAAAUUCGACGAGGACGAUUCCGAGCCUGUUUUAAAAGGAGUGAAAUUACAU |
| | | UAUACUUAAAUGAGACCAUA |
| 142 | 2A9481 | AUAGGUCUCACAUGUUCGUGUUCCUGGUGCUGCUGCCCUUAGUGUCCUCCCAGUGUGUGAACCUGACCACCAGA |
| | | ACCCAGUUACCUCCCGCUUACACCAACUCCUUUACCCGCGGAGUGUACUACCCUGAUAAGGUUUUUAGAUCCUCC |
| | | GUUCUGCAUUCUACCCAAGACCUGUUUUUACCCUUCUUUUCCAACGUGACCUGGUUCCACGCUAUCCACGUGUCC |
| | | GGCACUAACGGCACUAAGCGCUUCGACAAUCCUGUGCUCCCUUUUAACGACGGCGUGUACUUCGCUUCUACCGAA |
| | | AAAUCCAACAUCAUCCGCGGCUGGAUCUUCGGAACUACCCUGGAUUCUAAAACCCAGUCUUUAUUAAUCGUGAAU |
| | | AACGCCACCAACGUGGUUAUUAAGGUCUGUGAGUUCCAAUUUUGCAACGACCCUUUCUUAGGCGUUUAUUACCAC |
| | | AAAAACAAUAAGUCUUGGAUGGAGUCCGAAUUCCGCGUGUACUCCUCUGCCAACAAUUGCACCUUUGAGUACGUG |
| | | UCCCAGCCCUUCCUGAUGGACCUGGAAGGCAAGCAGGGCAAUUUUAAAAAUCUGCGCGAAUUCGUUUUCAAGAAC |
| | | AUCGACGGCUACUUUAAGAUUUAUUCCAAACAUACCCCCAUCAACCUGGUGCGCGAUUUACCCCAGGGCUUCUCC |
| | | GCCUUAGAGCCCUUAGUGGAUCUGCCUAUCGGCAUCAAUAUCACCCGCUUUCAGACUCUGCUGGCCCUGCACAGA |
| | | UCCUACCUGACUCCCGGAGACUCUUCUUCUGGCUGGACCGCCGGAGCUGCCGCCUACUACGUGGGCUACCUGCA |
| | | ACCCCGCACCUUUCUGCUGAAGUACAACGAAAACGGCACCAUCACAGACGCCGUUGACUGCGCUCUGGACCCCCU |
| | | GUCUGAGACUAAGUGCACCCUGAAGUCCUUCACUGUGGAGAAAGGAAUCUACCAGACCUCCAACUUCCGCGUGCA |
| | | GCCUACCGAAUCCAUUGUUCGCUUCCCUAACAUUACUAAUCUGUGCCCCUUCGGAGAAGUUUUCAACGCCACUAG |
| | | AUUCGCUUCCGUGUACGCCUGGAAUCGCAAGCGCAUCUCCAAUUGCGUUGCUGACUACUCUGUGUUAUACAAUUC |
| | | CGCCUCUUUUUCCACUUUCAAGUGCUACGGCGUGUCUCCUACCAAGCUGAACGACCUGUGUUUCACUAACGUGUA |
| | | CGCUGAUUCCUUUGUUAUCCGCGGCGACGAGGUGAGACAGAUCGCCCCUGGCCAGACCGGAAAAAUCGCCGACU |
| | | ACAACUACAAGUUACCCGACGAUUUUACCGGCUGUGUUAUUGCUUGGAACUCUAAUAAUCUGGACUCUAAAGUGG |
| | | GCGGCAAUUACAACUACUUAUAUCGCCUGUUCAGAAAAUCCAACCUGAAACCCUUCGAACGGGACAUUUCCACCGA |
| | | AAUUUAUCAGGCCGGCUCCACCCCCUGCAACGGAGUGGAGGGCUUCAAUUGCUACUUCCCCCUGCAAUCCUACG |
| | | GCUUUCAGCCCACCAACGGCGUGGGAUACCAGCCCUACCGCGUUGUUGUGUUAUCCUUUGAACUGCUGCACGCU |
| | | CCUGCUACUGUGUGCGGACCUAAAAAAUCCACCAAUCUGGUGAAGAACAAGUGUGUGAAUUUUAAUUUUAACGGC |
| | | CUGACCGGCACCGGAGUGCUGACCGAGUCCAACAAAAAGUUUCUGCCCUUUCAGCAGUUCGGCCGGGACAUUGC |
| | | CGACACUACCGACGCUGUGAGGGAUCCUCAGACCCUGGAGAUUCUGGACAUUACCCCUUGCUCCUUCGGAGGAG |
| | | UUUCCGUGAUCACCCCUGGCACCAAUACUUCUAACCAAGUGGCUGUUUUAUACCAGGACGUGAAUUGUACUGAGG |
| | | UGCCUGUGGCCAUCCACGCCGAUCAAUUAACUCCCACCUGGAGAGUGUAUUCCACCGGCUCUAACGUUUUCCAAA |
| | | CCCGCGCUGGCUGCUUAAUCGGCGCUGAGCACGUGAACAACUCCUACGAGUGUGAUAUUCCUAUCGGAGCCGGC |
| | | AUCUGUGCUUCCUACCAGACUCAGACCAACUCCCCCAGACGCGCUAGGUCCGUGGCUUCCCAGUCUAUUAUCGCU |
| | | UAUACUAUGUCCCUGGGAGCCGAGAAUUCUGUUGCCUAUUCCAAUAACUCCAUCGCCAUUCCUACCAACUUUACC |
| | | AUCUCUGUGACCACCGAGAUUCUGCCCGUGUCCAUGACCAAAACUUCUGUGGAUUGUACCAUGUACAUCUGUGGA |
| | | GAUUCCACCGAGUGCUCUAACCUGCUGCUGCAGUACGGCUCCUUUUGCACCCAAUUAAACCGCGCUCUGACUGG |
| | | CAUCGCCGUGGAGCAAGAUAAAAACACCCAAGAGGUGUUCGCUCAGGUGAAGCAGAUCUACAAGACACCUCCCAU |
| | | UAAAGAUUUCGGAGGCUUUAAUUUCUCUCAGAUCCUGCCCGACCCUUCUAAGCCCUCUAAACGCUCCUUCAUCGA |
| | | GGAUCUGCUGUUCAACAAGGUUACCCUGGCCGACGCUGGCUUUAUCAAACAGUACGGCGACUGCUUAGGCGACA |
| | | UCGCCGCCCGCGAUUUAAUUUGCGCUCAGAAGUUCAACGGACUGACCGUGCUGCCUCCUCUGCUGACCGACGAA |
| | | AUGAUCGCCCAAUACACCUCCGCCCUGCUGGCUGGCACUAUCACCUCCGGCUGGACCUUUGGCGCUGGAGCCGC |
| | | UCUGCAAAUCCCUUUCGCUAUGCAGAUGGCUUACCGCUUUAACGGAAUCGGCGUGACCCAGAACGUGUUAUACGA |
| | | AAAUCAGAAAUUAAUUGCCAAUCAAUUUAACUCUGCCAUCGGCAAGAUUCAGGAUUCUCUGUCUUCUACUGCCUCU |
| | | GCCUUAGGAAAACUGCAGGACGUGGUGAAUCAGAACGCCCAGGCCCUGAAUACCCUGGUUAAGCAACUGUCUUCC |
| | | AAUUUCGGCGCUAUCUCCUCUGUGUUAAACGACAUUCUGUCCCGCCUGGAUCCUCCUGAGGCCGAAGUGCAAAUU |
| | | GACCGCUUAAUCACUGGCAGACUGCAAUCCCUGCAAACCUACGUUACUCAACAGCUGAUCAGAGCCGCCGAAAUC |
| | | CGCGCUUCUGCCAACUUAGCUGCUACCAAGAUGUCCGAGUGCGUGCUGGGACAGUCCAAAAGAGUUGACUUUUG |
| | | CGGAAAGGGCUACCACCUGAUGUCCUUUCCCCAGUCCGCCCCCCACGGAGUUGUUUUCCUGCACGUUACUUACG |
| | | UUCCUGCUCAAGAGAAGAACUUCACCACCGCUCCCGCUAUUUGCCACGACGGCAAGGCUCAUUUCCCCAGAGAGG |
| | | GAGUGUUUGUGUCCAACGGCACUCACUGGUUUGUUACUCAGCGCAACUUCUACGAACCUCAGAUCAUCACCACUG |
| | | ACAAUACCUUUGUGUCCGGAAACUGUGACGUGGUUAUCGGCAUUGUGAACAAUACUGUGUACGACCCUUUACAAC |
| | | CUGAGCUGGAUUCUUUUAAAGAAGAACUGGACAAGUACUUCAAGAACCACACCUCCCCCGACGUGGAUCUGGGCG |
| | | ACAUCUCCGGCAUCAACGCCUCUGUGGUGAAUAUUCAGAAGGAGAUUGAUCGCCUGAACGAGGUUGCCAAGAAUC |
| | | UGAACGAGUCUCUGAUCGACCUGCAGGAGCUGGGCAAGUACGAACAGUACAUCAAGUGGCCCUGGUACAUUUGG |
| | | CUGGGCUUUAUUGCUGGACUGAUCGCUAUCGUUAUGGUUACCAUCAUGCUGUGCUGUAUGACCUCUUGCUGCUC |
| | | CUGUCUGAAAGGCUGUUGCUCCUGCGGCUCCUGUUGUAAGUUUGACGAGGACGACUCCGAGCCUGUUCUGAAAG |
| | | GAGUUAAACUGCACUACACCUAAAUGAGACCAUA |
| 143 | 2A0581 | AUAGGUCUCACAUGUUUGUGUUUCUGGUGCUGCUGCCUCUGGUGUCCUCUCAGUGUGUUAACCUGACCACCAGA |
| | | ACCCAACUGCCCCCCGCCUACACUAACUCUUUCACUCGCGGCGUGUACUACCCCGAUAAAGUUUUCAGAUCCUCC |
| | | GUGCUCCAUUCUACCCAAGACCUGUUCUUACCCUUUUUCUCCAACGUGACCUGGUUCCACGCCAUCCACGUGUCC |
| | | GGCACUAACGGAACCAAGCGCUUCGAUAAUCCCGUGCUGCCUUUCAACGACGGAGUUUACUUUGCUUCCACCGAG |
| | | AAGUCCAAUAUUAUCCGGGGCUGGAUCUUCGGCACCACACUGGAUUCCAAAACCCAGUCCUUACUGAUUGUGAAC |
| | | AACGCCACUAACGUGGUGAUCAAGGUGUGUGAGUUCCAGUUCUGUAACGACCCCUUUCUGGGCGUGUAUUAUCA |
| | | UAAAAACAACAAGUCCUGGAUGGAGUCCGAGUUUAGAGUGUAUUCUUCCGCUAACAACUGCACCUUCGAAUACGU |
| | | GUCCCAGCCUUUCCUGAUGGAUCUGGAAGGAAAGCAGGGCAACUUCAAGAACUUACGCGAGUUCGUGUUCAAGAA |
| | | CAUCGACGGCUACUUCAAAAUUUACUCCAAGCACACCCCUAUCAACUUAGUGAGAGAUCUGCCCCAGGGCUUCUC |
| | | CGCUCUGGAACCUCUGGUGGACUUACCCAUUGGCAUCAACAUCACUCGCUUCCAAACACUGCUCGCUCUGCACCG |
| | | CUCUUAUCUGACCCCCGGCGACUCCUCUUCUGGCUGGACCGCCGGCGCCGCUGCCUAUUACGUGGGAUACCUGC |
| | | AACCCCGCACCUUUCUGCUGAAAUACAACGAAAACGGCACCAUCACAGACGCUGUGGACUGCGCUCUGGACCCCC |
| | | UGUCCGAGACUAAGUGCACCCUGAAGUCCUUCACCGUUGAAAAGGGCAUUUAUCAGACUUCCAACUUCCGCGUGC |
| | | AGCCUACUGAGUCCAUUGUGCGCUUCCCUAACAUCACUAACUUGUGUCCUUUCGGCGAAGUGUUCAACGCUACUC |
| | | GCUUCGCCUCCGUGUACGCCUGGAACCGCAAGAGAAUCUCCAAUUGCGUGGCCGACUACUCUGUUCUCUACAACU |
| | | CUGCCUCCUUCUCCACCUUUAAGUGCUACGGCGUGUCCCCCACCAAACUGAACGACCUGUGCUUCACCAACGUGU |
| | | ACGCCGACUCCUUUGUGAUCAGAGGCGACGAGGUGCGCCAGAUCGCCCCCGGCCAGACUGGCAAGAUCGCCGAU |
| | | UACAAUUACAAGCUGCCUGACGACUUUACCGGCUGCGUGAUUGCCUGGAACUCCAACAACCUGGACUCCAAAGUG |
| | | GGCGGCAACUACAACUACCUGUACCGCCUGUUUAGAAAAUCCAACCUGAAGCCCUUCGAGCGGGACAUUUCUACU |
| | | GAGAUCUACCAGGCCGGCUCCACCCCCUGUAACGGCGUGGAAGGCUUCAACUGCUACUUUCCCCUGCAGUCCUA |
| | | CGGCUUCCAGCCUACCAACGGCGUGGGCUACCAGCCCUACCGCGUGGUGGUGUUAUCCUUCGAGCUGCUGCACG |
| | | CCCCUGCCACCGUGUGCGGACCCAAAAAGUCUACUAACCUGGUUAAGAAUAAGUGUGUUAAUUUCAAUUUUAACG |
| | | GCUUAACCGGAACCGGAGUGCUGACCGAGUCCAAUAAAAAGUUCCUGCCCUUUCAGCAGUUUGGCCGCGACAUCG |
| | | CCGAUACUACCGACGCCGUGCGCGAUCCCCAGACCCUGGAGAUCCUGGACAUUACCCCCUGCUCUUUCGGCGGA |
| | | GUGUCCGUGAUCACCCCCGGCACCAAUACCUCCAAUCAGGUGGCCGUUCUGUACCAGGACGUGAAUUGCACCGAA |
| | | GUGCCCGUGGCCAUUCACGCCGACCAGUUAACUCCUACUUGGAGAGUGUACUCCACCGGCUCUAACGUGUUUCA |
| | | GACCCGCGCCGGCUGUCUGAUCGGCGCCGAGCACGUGAACAACUCCUACGAGUGCGACAUUCCCAUUGGCGCCG |
| | | GCAUCUGCGCCUCCUACCAAACCCAGACUAACUCUCCCAGACGCGCCCGCUCUGUGGCCUCUCAGUCCAUCAUCG |
| | | CUUACACUAUGUCCCUGGGCGCCGAGAACUCCGUGGCCUAUUCCAACAACUCCAUCGCCAUCCCCACUAACUUCA |
| | | CCAUCUCUGUGACCACCGAAAUCCUCCCCGUGUCUAUGACUAAGACUUCCGUGGACUGUACCAUGUACAUUUGCG |
| | | GCGACUCCACCGAGUGUUCCAAUCUGCUGCUGCAGUACGGCUCCUUUUGCACCCAGCUGAACCGCGCCCUGACC |
| | | GGCAUCGCUGUUGAGCAGGACAAGAAUACCCAGGAGGUGUUUGCUCAGGUGAAGCAAAUCUAUAAGACCCCUCCC |
| | | AUCAAGGACUUUGGCGGCUUCAACUUUUCCCAGAUCCUGCCCGACCCUUCCAAGCCCUCCAAACGCUCUUUCAUC |
| | | GAAGAUCUGCUGUUCAAUAAAGUGACCCUGGCCGACGCCGGCUUCAUCAAGCAGUACGGAGACUGUCUGGGAGA |
| | | CAUUGCUGCUCGCGACCUGAUUUGCGCCCAGAAGUUCAACGGCCUGACCGUGCUGCCCCCUCUGCUGACCGACG |
| | | AGAUGAUCGCUCAGUACACCUCCGCCCUGCUGGCUGGCACUAUCACCUCCGGCUGGACUUUCGGCGCUGGCGCC |
| | | GCCCUGCAGAUUCCCUUCGCCAUGCAGAUGGCUUAUCGCUUCAACGGAAUCGGAGUGACACAGAACGUGCUGUA |
| | | CGAGAAUCAGAAACUGAUCGCUAACCAGUUUAAUUCCGCCAUUGGCAAGAUCCAGGACUCCCUGUCCUCUACUGC |
| | | UUCCGCCCUGGGCAAGCUGCAGGACGUGGUGAACCAGAACGCCCAGGCUCUGAACACCCUGGUGAAGCAACUGU |
| | | CUUCUAACUUUGGAGCCAUUUCUUCCGUGCUGAACGACAUCCUGUCCAGACUGGAUCCUCCUGAGGCCGAGGUG |
| | | CAGAUCGACCGCCUGAUCACUGGCCGCCUGCAGUCCCUGCAGACUUACGUUACCCAGCAAUUAAUCCGCGCUGCC |
| | | GAGAUCCGCGCCUCCGCCAACCUGGCCGCCACCAAGAUGUCCGAGUGCGUUCUGGGCCAGUCCAAACGCGUUGA |
| | | CUUCUGCGGCAAGGGCUACCACCUGAUGUCCUUCCCCCAGUCCGCUCCCCACGGAGUGGUGUUCCUGCACGUGA |
| | | CCUACGUGCCUGCCCAGGAGAAGAACUUCACCACCGCCCCCGCCAUUUGCCACGACGGAAAGGCCCACUUCCCCC |
| | | GCGAGGGAGUGUUCGUUUCUAACGGCACUCACUGGUUCGUGACCCAGAGAAACUUCUACGAGCCCCAGAUUAUUA |
| | | CCACCGACAAUACCUUCGUUUCUGGCAACUGCGACGUGGUUAUCGGCAUCGUGAACAACACCGUGUACGACCCCC |
| | | UGCAACCCGAGCUGGAUUCUUUCAAGGAGGAGCUGGAUAAGUACUUUAAAAACCAUACCUCCCCCGACGUGGACC |
| | | UGGGCGACAUCUCUGGCAUCAACGCCUCCGUGGUGAAUAUCCAGAAGGAGAUCGAUCGCCUGAACGAGGUGGCC |
| | | AAGAACUUAAACGAAUCUCUGAUCGACCUGCAGGAGCUGGGCAAGUACGAGCAGUAUAUUAAGUGGCCCUGGUAU |
| | | AUCUGGUUAGGCUUUAUCGCCGGCCUGAUCGCCAUUGUUAUGGUGACCAUCAUGCUGUGCUGCAUGACCUCCUG |
| | | CUGUUCCUGUUUAAAAGGCUGCUGCUCCUGCGGAUCCUGCUGUAAAUUCGACGAAGACGACUCCGAGCCCGUGC |
| | | UGAAAGGAGUUAAGUUACACUAUACCUAAAUGAGACCAUA |
| 144 | 2A1581 | AUAGGUCUCACAUGUUCGUGUUCCUGGUGCUGCUGCCCCUGGUGUCCUCCCAGUGCGUCAACCUGACCACCCGG |
| | | ACCCAACUGCCCCCUGCCUAUACCAAUUCCUUCACCCGGGGCGUCUACUACCCCGACAAGGUGUUCCGGUCCUCU |
| | | GUGCUCCACUCCACCCAGGACCUCUUCCUCCCCUUUUUCUCCAACGUGACCUGGUUCCACGCCAUCCACGUGUCU |
| | | GGCACAAACGGAACCAAGCGCUUCGACAACCCUGUGCUCCCCUUCAACGACGGCGUGUACUUCGCCUCCACCGAG |
| | | AAGUCCAACAUCAUCCGCGGCUGGAUCUUCGGCACCACCCUCGACUCUAAGACCCAGUCCCUGCUGAUUGUGAAU |
| | | AACGCCACCAACGUGGUGAUCAAGGUGUGCGAAUUUCAGUUCUGCAACGACCCCUUCCUGGGCGUUUACUACCAU |
| | | AAGAACAACAAGUCCUGGAUGGAGUCCGAGUUCCGGGUGUAUUCCUCUGCCAAUAACUGCACCUUUGAGUACGUG |
| | | UCCCAGCCCUUCCUGAUGGACCUGGAGGGCAAGCAGGGCAAUUUUAAAAACCUGCGCGAGUUCGUGUUCAAGAAC |
| | | AUCGACGGCUACUUCAAGAUCUAUUCCAAGCACACCCCUAUCAACCUGGUGCGCGACCUGCCCCAGGGCUUUUCC |
| | | GCUCUGGAGCCCCUGGUUGACCUGCCCAUCGGCAUCAACAUCACCCGCUUCCAGACUUUACUGGCCCUGCACCG |
| | | CUCCUACCUGACCCCCGGCGAUUCCUCUUCUGGCUGGACAGCCGGAGCCGCUGCCUACUACGUGGGAUACCUGC |
| | | AGCCCCGCACCUUCCUGCUGAAGUACAACGAGAACGGAACCAUUACAGACGCUGUCGACUGUGCUCUGGAUCCCC |
| | | UGUCCGAAACAAAGUGCACCCUGAAGUCCUUCACCGUGGAGAAGGGCAUCUACCAGACCUCCAACUUCCGCGUGC |
| | | AGCCCACCGAGUCCAUCGUGAGAUUCCCCAACAUCACUAACCUGUGCCCCUUCGGCGAGGUGUUCAACGCCACCC |
| | | GCUUCGCCUCCGUGUACGCCUGGAACCGCAAGCGCAUCUCCAACUGCGUUGCCGACUACUCUGUGCUCUACAAC |
| | | UCCGCCUCCUUCUCCACCUUCAAGUGCUACGGCGUGUCCCCCACCAAGCUGAACGACCUGUGCUUCACCAACGUG |
| | | UACGCCGACUCCUUCGUGAUCCGCGGCGACGAGGUGCGCCAGAUCGCCCCCGGCCAGACCGGAAAGAUCGCCGA |
| | | UUACAAUUACAAGCUGCCCGACGACUUCACCGGCUGCGUGAUCGCCUGGAACUCCAACAAUCUGGACUCCAAGGU |
| | | UGGCGGCAACUACAACUACCUGUACCGCCUGUUCCGCAAGUCCAACCUGAAGCCCUUCGAGCGGGACAUUUCCAC |
| | | AGAGAUUUACCAGGCUGGCUCCACCCCCUGUAACGGAGUGGAGGGCUUCAACUGCUACUUCCCCCUGCAGUCCU |
| | | ACGGCUUCCAGCCCACCAACGGCGUGGGCUACCAGCCCUACCGCGUGGUGGUGCUGUCCUUCGAGCUGCUGCAC |
| | | GCCCCUGCCACCGUGUGCGGCCCCAAGAAGUCCACCAACCUGGUGAAGAACAAGUGCGUGAACUUCAACUUCAAC |
| | | GGACUGACAGGCACCGGCGUGCUGACCGAGUCCAACAAGAAGUUCCUGCCCUUCCAGCAGUUCGGCCGGGACAU |
| | | UGCCGACACCACCGACGCCGUGCGCGACCCCCAGACCCUGGAGAUCCUGGACAUCACCCCCUGCUCCUUCGGCG |
| | | GAGUGUCCGUGAUCACCCCCGGCACCAACACCUCCAACCAGGUUGCCGUGCUGUACCAGGACGUUAACUGCACC |
| | | GAGGUGCCCGUGGCCAUCCACGCCGACCAGCUGACCCCCACCUGGCGCGUGUACUCCACCGGCUCCAACGUGUU |
| | | CCAGACCCGCGCCGGCUGCCUGAUCGGCGCCGAGCACGUGAACAACUCCUACGAGUGCGACAUCCCCAUUGGCG |
| | | CCGGCAUCUGCGCCUCCUACCAGACCCAGACCAACUCCCCUCGCCGCGCCCGGUCCGUCGCCUCCCAGUCCAUC |
| | | AUCGCCUACACCAUGUCCCUGGGCGCCGAGAACUCCGUGGCCUACUCCAACAACUCCAUUGCCAUCCCCACCAAC |
| | | UUCACCAUCUCCGUGACCACCGAAAUCCUCCCCGUGUCCAUGACCAAGACCUCCGUGGACUGCACCAUGUACAUC |
| | | UGCGGCGACUCCACCGAGUGCUCCAACCUGCUGCUGCAGUACGGCUCCUUCUGCACCCAGCUGAAUCGCGCCCU |
| | | GACCGGCAUCGCCGUGGAGCAGGACAAGAACACCCAAGAGGUGUUCGCCCAGGUGAAGCAGAUCUACAAGACACC |
| | | UCCCAUCAAGGACUUCGGCGGCUUCAACUUCUCCCAGAUCCUGCCCGACCCCUCCAAGCCCUCCAAGCGCUCCUU |
| | | CAUCGAGGACCUGCUGUUCAACAAGGUGACCCUGGCCGACGCCGGCUUCAUCAAGCAGUACGGCGACUGUCUGG |
| | | GAGACAUUGCCGCCCGCGACCUGAUCUGCGCCCAGAAGUUCAACGGCUUAACCGUGCUGCCCCCUCUGCUGACC |
| | | GACGAGAUGAUCGCCCAGUACACAUCCGCUCUGCUGGCCGGCACCAUCACCUCCGGCUGGACCUUUGGCGCUGG |
| | | CGCUGCCCUGCAGAUCCCCUUCGCUAUGCAGAUGGCCUACCGCUUCAACGGCAUCGGCGUGACCCAGAACGUGC |
| | | UGUACGAGAACCAGAAGCUGAUCGCCAACCAGUUCAACUCCGCCAUCGGCAAGAUCCAGGACUCCCUGUCCUCCA |
| | | CCGCCUCCGCCCUGGGCAAGCUGCAGGACGUGGUGAACCAGAACGCCCAGGCCCUGAACACCCUGGUGAAGCAG |
| | | CUGUCCUCUAACUUCGGCGCCAUCUCCUCCGUGCUGAACGACAUUCUGUCCCGCCUGGAUCCUCCUGAGGCCGA |
| | | GGUGCAAAUCGAUCGCCUCAUCACCGGCCGCCUGCAGUCCCUGCAGACCUACGUGACACAGCAGCUGAUCCGCG |
| | | CCGCCGAGAUCCGCGCCUCCGCCAACCUGGCCGCCACCAAGAUGUCUGAGUGCGUGCUGGGCCAGUCCAAACGC |
| | | GUUGACUUCUGCGGCAAGGGCUACCACCUGAUGUCCUUCCCCCAGUCCGCCCCCCACGGCGUGGUGUUCCUGCA |
| | | CGUGACCUACGUGCCCGCCCAGGAGAAGAACUUCACUACCGCCCCCGCCAUCUGCCACGACGGCAAGGCCCACUU |
| | | CCCCCGCGAGGGCGUGUUCGUGUCCAACGGCACCCACUGGUUCGUGACCCAGCGCAACUUCUACGAGCCCCAGA |
| | | UCAUCACCACCGACAACACCUUCGUGUCCGGCAACUGCGACGUGGUGAUUGGCAUCGUGAACAACACCGUGUACG |
| | | ACCCCCUGCAGCCCGAGCUGGACUCCUUCAAGGAGGAGCUGGACAAGUACUUUAAGAACCACACCUCCCCCGACG |
| | | UGGACCUGGGCGACAUCUCCGGCAUCAACGCCUCCGUGGUGAACAUCCAGAAGGAGAUCGACCGCCUGAACGAG |
| | | GUGGCCAAGAACCUGAACGAGUCCCUGAUCGACCUGCAGGAGCUGGGCAAGUACGAACAGUACAUCAAGUGGCCC |
| | | UGGUACAUCUGGCUGGGCUUCAUCGCCGGCCUGAUCGCCAUCGUGAUGGUGACCAUCAUGCUGUGCUGCAUGAC |
| | | CUCUUGCUGUUCCUGUCUGAAGGGCUGCUGCUCCUGCGGCUCCUGCUGCAAGUUCGACGAGGACGACUCCGAGC |
| | | CCGUGCUGAAGGGCGUGAAGCUGCACUACACCUAAAUGAGACCAUA |
| 145 | 2A2581 | AUAGGUCUCACAUGUUCGUGUUCCUGGUGCUGCUCCCCCUGGUGAGCUCCCAGUGCGUCAACCUGACCACACGG |
| | | ACCCAGCUGCCCCCCGCCUAUACCAACAGCUUCACCCGCGGCGUCUACUACCCCGACAAGGUGUUCCGGAGCAGC |
| | | GUGCUGCACAGCACCCAGGACCUCUUCCUCCCCUUUUUUAGCAACGUGACCUGGUUCCACGCCAUCCACGUGAG |
| | | UGGCACCAACGGCACCAAGCGGUUCGACAACCCUGUGCUCCCCUUCAACGACGGCGUGUACUUCGCUAGCACAGA |
| | | AAAAAGUAACAUCAUUCGGGGCUGGAUCUUCGGCACCACACUGGAUAGCAAAACCCAGAGCCUGCUGAUUGUGAA |
| | | UAACGCCACCAACGUGGUGAUCAAGGUGUGCGAGUUCCAGUUCUGCAACGACCCCUUCCUGGGCGUGUACUACC |
| | | ACAAGAACAACAAGAGCUGGAUGGAGAGCGAGUUCCGCGUGUAUAGCUCUGCCAACAACUGCACCUUCGAGUACG |
| | | UGAGCCAGCCCUUCCUGAUGGACCUGGAGGGCAAGCAGGGCAAUUUCAAAAACCUGCGGGAGUUCGUGUUCAAG |
| | | AACAUCGACGGCUACUUCAAGAUCUACAGCAAGCACACCCCCAUCAACCUGGUGCGGGACCUGCCCCAGGGCUUU |
| | | AGCGCUCUGGAGCCCCUGGUGGACCUGCCCAUCGGCAUCAACAUCACCCGCUUCCAAACCCUGUUGGCCCUGCA |
| | | CCGGAGCUACCUGACCCCUGGCGAUAGCAGUAGUGGCUGGACAGCCGGAGCCGCCGCCUACUACGUGGGAUACC |
| | | UGCAGCCCCGGACCUUCCUGCUGAAGUACAACGAGAACGGCACAAUCACAGACGCCGUGGACUGCGCCCUGGAC |
| | | CCCCUGAGCGAAACAAAGUGCACCCUCAAAAGUUUCACCGUGGAGAAGGGCAUCUACCAGACCAGCAACUUCCGG |
| | | GUGCAGCCCACCGAGAGCAUCGUGCGGUUCCCCAACAUCACCAACCUGUGCCCCUUCGGCGAGGUGUUCAACGC |
| | | CACCCGGUUCGCCAGCGUGUACGCCUGGAACCGGAAGCGGAUCAGCAACUGCGUGGCCGACUACAGCGUGCUGU |
| | | AUAACAGUGCCAGCUUCAGCACCUUCAAGUGCUACGGCGUGAGCCCCACCAAGCUGAACGACCUGUGCUUCACCA |
| | | ACGUGUACGCCGACAGCUUCGUGAUCCGGGGCGACGAGGUGCGGCAGAUCGCCCCCGGCCAGACCGGCAAGAUC |
| | | GCCGAUUACAAUUACAAGCUGCCCGACGAUUUCACCGGCUGCGUGAUCGCCUGGAACAGCAACAACCUGGACAGC |
| | | AAGGUGGGCGGCAACUACAACUACCUGUACCGGCUGUUCCGCAAAAGUAACCUGAAGCCCUUCGAGCGGGACAUC |
| | | AGCACCGAGAUCUACCAGGCCGGCAGUACCCCUUGCAACGGCGUCGAGGGCUUCAACUGCUACUUCCCCCUGCA |
| | | GAGCUACGGCUUCCAGCCCACCAACGGCGUGGGCUACCAGCCCUACCGGGUGGUGGUUCUGAGCUUCGAGCUGC |
| | | UGCACGCCCCUGCCACCGUGUGCGGCCCCAAGAAAAGCACCAACCUGGUGAAGAACAAGUGCGUGAAUUUCAAUU |
| | | UUAACGGACUCACCGGAACCGGCGUGCUGACCGAGAGCAACAAGAAGUUCCUGCCCUUCCAGCAAUUCGGCCGG |
| | | GAUAUUGCCGACACCACUGACGCCGUGCGGGACCCCCAGACCCUGGAGAUCCUGGACAUCACACCCUGUAGCUU |
| | | CGGCGGGGUGAGCGUGAUCACCCCCGGCACCAACACCAGCAACCAGGUGGCCGUGCUGUACCAGGACGUGAACU |
| | | GCACCGAGGUGCCCGUGGCCAUCCACGCCGACCAGCUGACCCCCACCUGGGGGGUGUACAGCACCGGCAGCAAC |
| | | GUGUUCCAGACCCGGGCCGGCUGCCUGAUCGGCGCCGAGCACGUGAAUAACAGCUACGAGUGCGACAUCCCCAU |
| | | CGGAGCCGGAAUCUGCGCCAGCUACCAGACCCAGACCAACAGCCCCCGGAGAGCCCGGAGCGUGGCCAGCCAGA |
| | | GCAUUAUUGCCUACACCAUGAGCCUGGGCGCCGAGAACAGCGUGGCCUACAGCAACAAUAGUAUUGCCAUCCCCA |
| | | CCAACUUCACCAUCAGCGUGACCACCGAAAUCCUCCCCGUGAGCAUGACCAAGACCAGCGUGGACUGCACCAUGU |
| | | ACAUCUGCGGCGACAGCACCGAGUGCAGCAACCUGCUCCUGCAGUACGGCAGCUUCUGCACCCAGCUGAACCGG |
| | | GCCCUGACCGGAAUUGCCGUGGAGCAGGACAAGAACACCCAGGAGGUGUUCGCCCAGGUGAAGCAGAUCUACAA |
| | | GACACCUCCCAUCAAGGACUUCGGCGGCUUCAACUUCAGCCAGAUCCUGCCCGACCCCAGCAAGCCCAGCAAGCG |
| | | GAGCUUCAUCGAGGACCUGUUGUUCAACAAGGUGACCCUGGCCGACGCCGGCUUCAUCAAGCAGUACGGCGACU |
| | | GUCUGGGAGAUAUUGCCGCACGGGACCUGAUCUGCGCCCAGAAGUUCAACGGCCUGACCGUGCUGCCCCCACUG |
| | | CUGACCGACGAGAUGAUCGCCCAGUACACAAGCGCUCUGCUCGCCGGCACCAUCACCAGCGGCUGGACCUUCGG |
| | | CGCCGGCGCUGCCCUGCAGAUCCCCUUCGCCAUGCAGAUGGCCUACCGGUUCAACGGCAUCGGCGUGACCCAGA |
| | | ACGUGCUGUACGAGAACCAGAAGCUGAUCGCCAACCAGUUCAACAGCGCCAUCGGCAAGAUCCAGGACAGCCUGA |
| | | GCUCCACCGCCAGCGCCCUGGGCAAGCUGCAGGACGUGGUGAACCAGAACGCCCAGGCCCUGAACACCCUGGUG |
| | | AAGCAGCUGAGCAGCAACUUCGGCGCCAUCAGCUCUGUGCUGAACGACAUCCUGAGCCGGCUGGAUCCUCCUGA |
| | | GGCCGAGGUGCAAAUCGAUCGGCUCAUCACCGGCCGGCUGCAGAGCCUGCAGACCUACGUGACACAGCAGCUGA |
| | | UCCGGGCCGCCGAGAUCCGGGCCAGCGCCAACCUGGCCGCUACCAAGAUGAGCGAGUGCGUGCUGGGCCAGAGC |
| | | AAGCGGGUGGACUUCUGCGGCAAGGGCUACCACCUGAUGAGCUUCCCCCAGAGCGCCCCCCACGGCGUGGUGUU |
| | | CCUGCACGUGACCUACGUGCCCGCCCAGGAGAAGAACUUCACCACCGCCCCCGCCAUCUGCCACGACGGCAAGG |
| | | CCCACUUCCCCCGGGAGGGCGUGUUCGUGAGCAACGGCACCCACUGGUUCGUGACCCAGCGGAACUUCUACGAG |
| | | CCCCAGAUCAUAACCACAGACAACACCUUCGUGAGCGGCAACUGCGACGUGGUCAUCGGCAUCGUGAACAACACC |
| | | GUGUACGACCCCCUGCAGCCCGAGCUGGACAGCUUCAAGGAGGAACUGGACAAGUACUUCAAGAACCACACCAGC |
| | | CCCGACGUGGACCUGGGCGACAUCAGCGGCAUCAACGCCAGCGUGGUGAACAUCCAGAAGGAGAUCGACCGGCU |
| | | GAACGAGGUGGCCAAGAACCUGAACGAGAGCCUGAUCGACCUGCAGGAGCUGGGCAAGUACGAGCAGUACAUCAA |
| | | GUGGCCCUGGUACAUCUGGCUGGGCUUUAUUGCCGGCCUGAUCGCCAUCGUGAUGGUGACCAUCAUGCUGUGCU |
| | | GUAUGACAAGCUGUUGCAGUUGCCUGAAGGGCUGCUGCAGCUGCGGCAGCUGCUGCAAGUUCGACGAGGACGAC |
| | | AGCGAGCCCGUGCUGAAGGGCGUGAAGCUGCACUACACCUAAAUGAGACCAUA |
| 146 | 2A3581 | AUAGGUCUCACACAUUAAAACAGCCUGUGGGUUGAUCCCACCCACAGGCCCAUUGGGCGCUAGCACUCUGGUAUC |
| | | ACGGUACCUUUGUGCGCCUGUUUUAUACCCCCUCCCCCAACUGUAACUUAGAAGUAACACACACCGAUCAACAGU |
| | | CAGCGUGGCACACCAGCCACGUUUUGAUCAAGCACUUCUGUUACCCCGGACUGAGUAUCAAUAGACUGCUCACGC |
| | | GGUUGAAGGAGAAAGCGUUCGUUAUCCGGCCAACUACUUCGAAAAACCUAGUAACACCGUGGAAGUUGCAGAGUG |
| | | UUUCGCUCAGCACUACCCCAGUGUAGAUCAGGUCGAUGAGUCACCGCAUUCCCCACGGGCGACCGUGGCGGUGG |
| | | CUGCGUUGGCGGCCUGCCCAUGGGGAAACCCAUGGGACGCUCUAAUACAGACAUGGUGCGAAGAGUCUAUUGAG |
| | | CUAGUUGGUAGUCCUCCGGCCCCUGAAUGCGGCUAAUCCUAACUGCGGAGCACACACCCUCAAGCCAGAGGGCA |
| | | GUGUGUCGUAACGGGCAACUCUGCAGCGGAACCGACUACUUUGGGUGUCCGUGUUUCAUUUUAUUCCUAUACUG |
| | | GCUGCUUAUGGUGACAAUUGAGAGAUCGUUACCAUAUAGCUAUUGGAUUGGCCAUCCGGUGACUAAUAGAGCUAU |
| | | UAUAUAUCCCUUUGUUGGGUUUAUACCACUUAGCUUGAAAGAGGUUAAAACAUUACAAUUCAUUGUUAAGUUGAAU |
| | | ACAGCAACAUGUUUGUUUUCUUAGUUUUAUUACCUUUAGUUUCUUCCCAGUGUGUUAAUUUAACUACUAGAACUC |
| | | AAUUACCUCCUGCUUAUACUAAUUCUUUUACUAGAGGAGUGUAUUAUCCUGAUAAGGUUUUUAGAUCUUCUGUUC |
| | | UGCACUCUACUCAGGAUUUGUUCUUGCCCUUCUUCUCUAACGUGACCUGGUUCCACGCUAUUCACGUUUCUGGAA |
| | | CCAACGGCACUAAGAGAUUUGAUAAUCCCGUUUUGCCUUUUAACGACGGAGUUUAUUUCGCCUCUACCGAAAAAU |
| | | CUAACAUCAUUAGGGGCUGGAUCUUUGGAACUACCCUGGAUUCUAAAACUCAAUCUUUAUUGAUUGUGAAUAACG |
| | | CUACCAACGUUGUGAUUAAAGUUUGUGAAUUUCAAUUUUGUAACGAUCCUUUUCUGGGAGUUUAUUAUCAUAAAA |
| | | ACAAUAAAUCUUGGAUGGAAUCUGAAUUCCGCGUUUAUUCUUCUGCCAAUAACUGUACCUUUGAGUACGUUUCUC |
| | | AACCUUUCUUAAUGGAUUUAGAAGGAAAACAAGGCAAUUUCAAAAACUUAAGAGAAUUUGUUUUUAAAAAUAUUGA |
| | | CGGAUAUUUUAAAAUUUAUUCUAAGCAUACUCCUAUUAAUUUAGUGAGAGACUUACCCCAAGGAUUUUCUGCUUUA |
| | | GAACCUUUAGUUGACUUACCUAUUGGAAUCAAUAUCACUAGAUUUCAAACUUUAUUAGCUUUACAUAGAUCUUAUU |
| | | UAACUCCUGGAGAUUCUUCCUCCGGCUGGACAGCCGGAGCCGCUGCUUAUUACGUUGGAUAUUUACAGCCUAGA |
| | | ACUUUUCUGCUGAAAUAUAACGAAAACGGAACCAUUACCGACGCCGUUGACUGUGCUCUGGAUCCUUUAUCUGAA |
| | | ACCAAGUGUACUUUAAAAUCUUUUACCGUUGAAAAAGGAAUUUAUCAAACUUCUAAUUUUAGAGUUCAACCUACUG |
| | | AAUCUAUCGUUAGAUUCCCUAAUAUUACUAAUUUGUGUCCCUUUGGAGAGGUUUUCAACGCUACUAGAUUUGCCU |
| | | CUGUUUACGCUUGGAAUCGCAAGAGAAUUUCUAAUUGUGUGGCCGAUUACUCCGUUUUGUAUAACUCUGCUUCUU |
| | | UCUCUACUUUUAAGUGUUACGGAGUUUCCCCUACUAAACUGAACGAUUUGUGUUUUACUAACGUUUACGCUGAUU |
| | | CUUUUGUUAUUAGAGGCGACGAAGUUAGACAAAUUGCUCCUGGACAAACUGGAAAGAUUGCUGACUAUAACUAUA |
| | | AACUGCCUGACGAUUUUACCGGCUGUGUUAUUGCUUGGAAUUCUAAUAAUUUAGAUUCUAAAGUUGGAGGAAAUU |
| | | AUAAUUAUUUAUAUAGAUUAUUUAGAAAAUCUAAUUUAAAACCUUUUGAAAGAGAUAUUUCCACUGAGAUUUACCA |
| | | GGCUGGAUCUACUCCUUGUAACGGCGUUGAGGGAUUUAAUUGUUAUUUUCCUUUACAAUCUUACGGAUUUCAACC |
| | | UACCAACGGAGUUGGAUAUCAACCUUACAGAGUUGUGGUGCUGUCUUUUGAAUUAUUACACGCUCCCGCUACUGU |
| | | UUGCGGCCCUAAAAAGUCUACUAAUCUGGUUAAGAAUAAGUGUGUGAAUUUUAAUUUCAACGGAUUGACCGGAAC |
| | | UGGAGUUCUGACUGAAUCUAAUAAAAAAUUUUUACCCUUUCAACAAUUUGGAAGGGAUAUCGCUGAUACUACUGAC |
| | | GCUGUUAGAGAUCCUCAAACUUUAGAAAUCCUGGAUAUUACUCCUUGUUCUUUUGGAGGAGUUUCCGUUAUUACU |
| | | CCUGGCACUAAUACUUCUAAUCAAGUUGCUGUUUUAUAUCAAGACGUUAAUUGCACCGAAGUUCCUGUUGCUAUU |
| | | CACGCUGAUCAGUUAACUCCUACUUGGAGAGUUUAUUCUACUGGAUCUAACGUUUUUCAAACCAGAGCUGGCUGU |
| | | UUAAUCGGAGCUGAACACGUGAAUAAUUCUUACGAGUGCGAUAUUCCCAUCGGAGCUGGAAUUUGUGCCUCUUAU |
| | | CAAACUCAAACCAAUUCUCCUAGGAGGGCUAGAUCCGUUGCCUCUCAAUCUAUUAUUGCUUAUACCAUGUCUUUA |
| | | GGAGCUGAAAAUUCCGUUGCUUACUCUAACAAUUCUAUUGCUAUUCCUACUAACUUUACUAUUUCUGUUACUACU |
| | | GAAAUUCUGCCCGUGUCCAUGACUAAAACUUCUGUUGAUUGUACUAUGUAUAUUUGUGGAGAUUCCACUGAGUGU |
| | | UCUAACCUGUUAUUACAAUACGGAUCUUUUUGUACUCAAUUAAAUAGAGCUCUGACUGGAAUUGCUGUUGAACAG |
| | | GACAAAAAUACUCAAGAAGUUUUUGCCCAAGUUAAACAGAUUUAUAAAACUCCUCCUAUUAAAGAUUUUGGAGGAU |
| | | UUAAUUUCUCUCAAAUUUUACCUGACCCUUCUAAGCCUUCCAAAAGGUCUUUCAUCGAAGAUUUAUUAUUUAAUAA |
| | | AGUUACCUUAGCCGACGCUGGAUUUAUUAAGCAAUACGGAGAUUGCUUAGGCGAUAUCGCUGCUAGAGACUUAAU |
| | | UUGUGCUCAAAAAUUUAACGGAUUAACUGUUUUACCUCCCCUGUUAACUGACGAAAUGAUCGCUCAAUAUACUUCU |
| | | GCUCUGUUAGCUGGAACUAUUACUUCUGGCUGGACUUUUGGAGCUGGAGCUGCUUUACAAAUUCCCUUUGCUAU |
| | | GCAGAUGGCUUAUAGAUUUAACGGAAUUGGAGUUACUCAAAACGUUUUAUACGAAAAUCAAAAAUUAAUUGCUAAU |
| | | CAAUUUAAUUCUGCUAUUGGAAAAAUUCAAGAUUCCCUGUCUUCUACUGCUUCCGCUCUGGGAAAAUUACAAGAC |
| | | GUUGUUAAUCAAAACGCUCAAGCUUUGAAUACCUUAGUUAAACAAUUAUCUUCCAAUUUUGGAGCUAUUUCUUCUG |
| | | UUUUAAACGACAUUUUAUCUAGAUUAGAUCCCCCUGAAGCUGAAGUUCAGAUUGACAGAUUGAUUACCGGAAGAU |
| | | UACAAUCUUUACAAACUUACGUUACUCAACAACUGAUUAGAGCUGCUGAAAUUAGAGCCUCUGCUAAUUUAGCUGC |
| | | UACUAAGAUGUCUGAGUGUGUUUUAGGACAGUCCAAAAGAGUUGAUUUUUGUGGAAAAGGCUAUCAUCUGAUGUC |
| | | UUUUCCUCAAUCUGCUCCUCACGGAGUUGUGUUUUUACACGUUACUUACGUUCCUGCUCAAGAGAAGAAUUUUAC |
| | | UACUGCUCCUGCUAUUUGUCACGACGGAAAAGCUCAUUUUCCUAGAGAAGGAGUUUUUGUUUCUAACGGAACUCA |
| | | UUGGUUUGUUACUCAAAGAAACUUUUACGAACCUCAGAUUAUUACCACUGAUAAUACCUUUGUUUCUGGCAAUUG |
| | | UGACGUGGUUAUUGGAAUUGUUAAUAAUACUGUUUACGAUCCUUUACAACCCGAACUGGAUUCUUUUAAAGAAGA |
| | | AUUAGAUAAAUACUUUAAAAAUCAUACUUCUCCCGACGUUGAUUUAGGAGAUAUCUCUGGAAUUAACGCUUCUGUU |
| | | GUGAAUAUUCAAAAGGAAAUUGAUAGAUUAAACGAAGUGGCUAAAAAUUUAAACGAGUCUUUAAUUGAUUUACAGG |
| | | AACUGGGAAAAUACGAACAAUAUAUUAAGUGGCCUUGGUACAUUUGGUUAGGCUUUAUUGCUGGACUGAUUGCUA |
| | | UUGUGAUGGUUACUAUCAUGUUGUGUUGCAUGACUUCUUGUUGUUCCUGUUUAAAAGGCUGUUGCUCUUGUGGA |
| | | UCUUGUUGCAAAUUUGACGAAGACGAUUCUGAACCUGUUCUGAAAGGAGUUAAACUGCAUUAUACUUAAAUGAGA |
| | | CCAUA |
| 147 | 2A4581 | AUAGGUCUCACACAUUAAAACAGCCUGUGGGUUGAUCCCACCCACAGGCCCAUUGGGCGCUAGCACUCUGGUAUC |
| | | ACGGUACCUUUGUGCGCCUGUUUUAUACCCCCUCCCCCAACUGUAACUUAGAAGUAACACACACCGAUCAACAGU |
| | | CAGCGUGGCACACCAGCCACGUUUUGAUCAAGCACUUCUGUUACCCCGGACUGAGUAUCAAUAGACUGCUCACGC |
| | | GGUUGAAGGAGAAAGCGUUCGUUAUCCGGCCAACUACUUCGAAAAACCUAGUAACACCGUGGAAGUUGCAGAGUG |
| | | UUUCGCUCAGCACUACCCCAGUGUAGAUCAGGUCGAUGAGUCACCGCAUUCCCCACGGGCGACCGUGGCGGUGG |
| | | CUGCGUUGGCGGCCUGCCCAUGGGGAAACCCAUGGGACGCUCUAAUACAGACAUGGUGCGAAGAGUCUAUUGAG |
| | | CUAGUUGGUAGUCCUCCGGCCCCUGAAUGCGGCUAAUCCUAACUGCGGAGCACACACCCUCAAGCCAGAGGGCA |
| | | GUGUGUCGUAACGGGCAACUCUGCAGCGGAACCGACUACUUUGGGUGUCCGUGUUUCAUUUUAUUCCUAUACUG |
| | | GCUGCUUAUGGUGACAAUUGAGAGAUCGUUACCAUAUAGCUAUUGGAUUGGCCAUCCGGUGACUAAUAGAGCUAU |
| | | UAUAUAUCCCUUUGUUGGGUUUAUACCACUUAGCUUGAAAGAGGUUAAAACAUUACAAUUCAUUGUUAAGUUGAAU |
| | | ACAGCAACAUGUUCGUGUUCUUAGUGCUGUUACCCCUGGUUUCUUCUCAGUGUGUCAAUUUAACCACCAGAACCC |
| | | AACUGCCUCCUGCCUAUACUAAUUCCUUUACCCGCGGAGUUUACUAUCCCGAUAAGGUUUUUCGCUCCUCUGUUU |
| | | UACACUCUACUCAGGACUUAUUCUUACCCUUCUUCUCCAACGUUACUUGGUUUCACGCCAUUCACGUUUCUGGAA |
| | | CCAACGGAACUAAGAGAUUCGAUAAUCCUGUGUUACCUUUCAACGACGGAGUUUAUUUUGCUUCCACUGAAAAAU |
| | | CCAAUAUCAUUAGGGGCUGGAUCUUUGGAACCACUUUAGAUUCCAAGACUCAAUCUUUAUUAAUUGUGAAUAACG |
| | | CCACCAACGUGGUUAUCAAAGUGUGUGAAUUCCAAUUUUGUAACGACCCUUUCUUAGGCGUGUAUUAUCACAAAA |
| | | AUAAUAAAUCUUGGAUGGAAUCUGAAUUUCGCGUUUACUCUUCCGCUAACAACUGCACUUUUGAGUACGUUUCCC |
| | | AGCCUUUUCUGAUGGAUCUGGAAGGCAAACAGGGAAAUUUUAAAAAUCUGAGAGAAUUUGUUUUUAAGAACAUUG |
| | | ACGGAUAUUUCAAGAUCUAUUCUAAACACACUCCCAUCAAUUUGGUUAGAGAUUUACCUCAGGGCUUUUCUGCUU |
| | | UAGAACCUUUAGUUGACCUGCCUAUUGGAAUCAACAUUACUAGAUUUCAAACUCUGUUAGCUCUGCAUAGAUCUU |
| | | AUUUAACUCCUGGAGAUUCCUCCUCCGGCUGGACCGCCGGAGCUGCUGCUUAUUACGUUGGCUAUUUACAACCC |
| | | AGAACUUUUCUGUUAAAAUAUAACGAAAACGGCACCAUCACUGACGCCGUGGAUUGUGCUUUAGAUCCCUUAUCC |
| | | GAAACUAAGUGUACUCUGAAAUCCUUCACUGUUGAAAAAGGAAUUUAUCAGACCUCUAAUUUUAGAGUGCAACCUA |
| | | CCGAAUCUAUUGUUAGAUUUCCUAAUAUUACCAACUUGUGCCCUUUUGGCGAAGUUUUCAACGCUACUAGAUUUG |
| | | CUUCUGUUUACGCUUGGAAUAGAAAAAGAAUUUCUAACUGUGUGGCUGACUAUUCCGUGUUAUACAAUUCUGCCU |
| | | CUUUUUCUACUUUUAAGUGUUACGGAGUGUCUCCCACUAAACUGAACGAUUUGUGCUUUACCAACGUUUACGCUG |
| | | AUUCUUUUGUUAUUAGAGGCGACGAGGUUCGCCAGAUUGCCCCUGGCCAGACUGGCAAAAUUGCUGACUAUAACU |
| | | AUAAAUUACCUGACGAUUUUACCGGCUGCGUUAUCGCUUGGAACUCUAAUAAUCUGGAUUCUAAAGUUGGAGGAA |
| | | ACUACAAUUAUUUAUAUAGAUUAUUUAGAAAAUCUAAUUUAAAACCCUUCGAGAGGGAUAUCUCUACUGAAAUCUA |
| | | CCAAGCUGGAUCUACUCCUUGCAACGGCGUUGAAGGAUUUAAUUGUUAUUUUCCUUUACAAUCUUACGGAUUCCA |
| | | ACCUACUAACGGAGUUGGAUAUCAGCCUUAUAGAGUGGUGGUUUUAUCUUUCGAAUUAUUACACGCUCCCGCUAC |
| | | UGUGUGUGGACCCAAAAAGUCUACUAAUUUAGUUAAAAAUAAGUGUGUUAAUUUCAAUUUUAACGGACUCACUGG |
| | | CACUGGAGUGUUAACUGAAUCUAAUAAAAAGUUCUUACCUUUCCAACAGUUCGGACGCGACAUUGCCGACACCAC |
| | | UGACGCUGUGAGAGAUCCUCAAACCUUAGAGAUUCUGGAUAUUACCCCUUGUUCCUUUGGAGGCGUUUCCGUUA |
| | | UCACUCCCGGAACUAACACUUCUAAUCAGGUUGCCGUUUUAUAUCAGGACGUUAAUUGCACUGAAGUUCCUGUUG |
| | | CUAUUCACGCUGAUCAACUGACUCCUACUUGGAGAGUUUAUUCCACUGGAUCUAACGUUUUUCAGACUCGCGCCG |
| | | GCUGUUUAAUUGGAGCUGAACACGUGAACAACUCCUACGAGUGCGAUAUUCCUAUUGGCGCUGGCAUCUGUGCU |
| | | UCUUAUCAAACUCAAACUAAUUCUCCCAGGAGGGCUCGCUCUGUUGCUUCCCAAUCUAUCAUUGCUUAUACUAUG |
| | | UCCUUAGGCGCUGAAAAUUCUGUUGCUUAUUCCAACAAUUCUAUUGCUAUUCCCACCAAUUUUACUAUUUCUGUG |
| | | ACUACUGAAAUUUUACCUGUUUCCAUGACUAAGACUUCUGUUGAUUGUACUAUGUAUAUCUGCGGAGAUUCUACU |
| | | GAGUGUUCCAACCUCUUAUUACAGUACGGAUCUUUUUGCACUCAGUUAAAUAGAGCUCUGACUGGAAUCGCUGUU |
| | | GAACAAGACAAAAACACCCAAGAAGUGUUUGCUCAGGUGAAGCAAAUUUACAAGACACCUCCUAUUAAGGAUUUUG |
| | | GAGGAUUCAAUUUUUCCCAGAUUUUACCUGAUCCUUCUAAACCUUCUAAACGCUCCUUUAUUGAAGAUUUACUGU |
| | | UCAAUAAAGUGACUCUGGCUGACGCUGGCUUCAUCAAGCAAUACGGCGAUUGUUUAGGAGACAUCGCUGCUAGAG |
| | | ACUUAAUUUGUGCUCAAAAAUUCAACGGACUGACUGUUCUGCCCCCUUUACUGACCGACGAGAUGAUCGCCCAAU |
| | | AUACUUCUGCCCUGUUAGCUGGCACCAUUACUUCUGGCUGGACCUUUGGAGCUGGCGCUGCUUUACAAAUUCCU |
| | | UUCGCCAUGCAGAUGGCUUAUCGCUUUAACGGAAUUGGCGUUACCCAAAACGUGUUAUACGAGAAUCAAAAAUUA |
| | | AUCGCCAAUCAAUUUAAUUCUGCUAUUGGCAAGAUUCAAGAUUCUUUAUCUUCUACUGCUUCCGCCCUGGGCAAA |
| | | CUGCAGGACGUUGUUAACCAGAACGCUCAAGCCCUGAACACUUUAGUGAAGCAACUGUCUUCUAACUUCGGCGCU |
| | | AUUUCUUCCGUUUUAAACGACAUUCUGUCUCGCUUAGAUCCCCCUGAGGCUGAGGUUCAAAUUGAUAGACUGAUU |
| | | ACUGGAAGAUUACAGUCCCUGCAAACUUACGUUACUCAACAGUUAAUCAGAGCUGCUGAAAUCCGCGCUUCCGCU |
| | | AAUUUAGCUGCUACUAAAAUGUCUGAGUGUGUGUUAGGCCAGUCUAAGAGAGUUGACUUUUGUGGCAAGGGCUA |
| | | UCAUUUAAUGUCUUUUCCUCAGUCCGCUCCUCACGGCGUUGUGUUCUUACACGUGACUUACGUUCCCGCCCAAGA |
| | | GAAAAAUUUUACCACUGCUCCUGCUAUUUGUCACGACGGAAAAGCUCAUUUUCCUAGAGAAGGAGUGUUUGUUUC |
| | | UAACGGAACCCACUGGUUUGUGACUCAAAGAAACUUUUACGAACCCCAAAUUAUUACUACUGACAAUACUUUCGUU |
| | | UCCGGCAACUGUGACGUGGUGAUCGGAAUUGUUAAUAACACCGUUUACGAUCCCUUACAACCUGAAUUAGAUUCU |
| | | UUUAAAGAAGAAUUAGAUAAAUAUUUCAAAAAUCAUACUUCCCCUGACGUUGAUCUGGGAGAUAUUUCUGGAAUUA |
| | | ACGCUUCUGUGGUGAACAUUCAAAAAGAGAUUGACAGAUUAAACGAAGUUGCUAAAAACCUGAACGAGUCCCUGAU |
| | | CGACCUGCAGGAACUGGGAAAAUACGAGCAGUAUAUUAAGUGGCCUUGGUAUAUUUGGUUAGGAUUUAUUGCUG |
| | | GAUUAAUUGCUAUUGUGAUGGUGACCAUUAUGUUGUGCUGUAUGACCUCUUGUUGUUCUUGCCUGAAGGGCUGC |
| | | UGUUCUUGUGGCUCUUGUUGCAAGUUUGACGAAGACGAUUCCGAACCCGUUUUAAAGGGAGUGAAACUGCAUUAU |
| | | ACUUAAAUGAGACCAUA |
| 148 | 2A5581 | AUAGGUCUCACACAUUAAAACAGCCUGUGGGUUGAUCCCACCCACAGGCCCAUUGGGCGCUAGCACUCUGGUAUC |
| | | ACGGUACCUUUGUGCGCCUGUUUUAUACCCCCUCCCCCAACUGUAACUUAGAAGUAACACACACCGAUCAACAGU |
| | | CAGCGUGGCACACCAGCCACGUUUUGAUCAAGCACUUCUGUUACCCCGGACUGAGUAUCAAUAGACUGCUCACGC |
| | | GGUUGAAGGAGAAAGCGUUCGUUAUCCGGCCAACUACUUCGAAAAACCUAGUAACACCGUGGAAGUUGCAGAGUG |
| | | UUUCGCUCAGCACUACCCCAGUGUAGAUCAGGUCGAUGAGUCACCGCAUUCCCCACGGGCGACCGUGGCGGUGG |
| | | CUGCGUUGGCGGCCUGCCCAUGGGGAAACCCAUGGGACGCUCUAAUACAGACAUGGUGCGAAGAGUCUAUUGAG |
| | | CUAGUUGGUAGUCCUCCGGCCCCUGAAUGCGGCUAAUCCUAACUGCGGAGCACACACCCUCAAGCCAGAGGGCA |
| | | GUGUGUCGUAACGGGCAACUCUGCAGCGGAACCGACUACUUUGGGUGUCCGUGUUUCAUUUUAUUCCUAUACUG |
| | | GCUGCUUAUGGUGACAAUUGAGAGAUCGUUACCAUAUAGCUAUUGGAUUGGCCAUCCGGUGACUAAUAGAGCUAU |
| | | UAUAUAUCCCUUUGUUGGGUUUAUACCACUUAGCUUGAAAGAGGUUAAAACAUUACAAUUCAUUGUUAAGUUGAAU |
| | | ACAGCAACAUGUUUGUUUUUCUGGUUUUAUUACCCUUAGUGUCCUCCCAGUGCGUGAACUUAACUACCCGCACUC |
| | | AGCUGCCUCCUGCCUAUACCAACUCUUUCACUAGAGGCGUUUACUAUCCUGACAAAGUUUUUAGAUCUUCUGUGC |
| | | UGCAUUCCACUCAAGAUUUAUUCCUGCCCUUCUUUUCUAACGUUACUUGGUUUCACGCCAUCCACGUGUCUGGCA |
| | | CCAACGGAACCAAACGCUUUGACAACCCUGUGUUACCUUUUAACGACGGAGUUUACUUCGCCUCCACUGAAAAGU |
| | | CCAAUAUUAUCCGGGGCUGGAUUUUCGGAACCACCUUAGAUUCUAAAACCCAGUCUCUGCUGAUUGUGAACAACG |
| | | CCACUAACGUGGUUAUUAAAGUGUGCGAGUUUCAAUUUUGCAACGACCCUUUUCUGGGAGUUUAUUACCACAAAA |
| | | AUAACAAAUCUUGGAUGGAGUCUGAAUUUAGAGUGUAUUCUUCCGCCAAUAAUUGCACCUUCGAGUACGUUUCCC |
| | | AACCCUUUCUGAUGGACUUAGAAGGAAAGCAAGGCAAUUUCAAAAACCUGCGCGAAUUUGUGUUCAAAAAUAUUGA |
| | | CGGCUAUUUCAAAAUUUACUCCAAGCAUACCCCUAUUAAUUUAGUGCGCGAUCUGCCUCAGGGCUUCUCUGCCUU |
| | | AGAGCCUUUAGUGGACCUGCCUAUUGGCAUUAAUAUUACUCGCUUUCAGACUUUACUGGCCCUGCAUAGAUCUUA |
| | | UUUAACUCCUGGAGACUCUUCUUCCGGCUGGACCGCUGGAGCCGCUGCCUACUACGUUGGCUAUCUGCAGCCUA |
| | | GAACUUUUUUAUUAAAGUACAACGAAAACGGAACCAUCACUGACGCUGUUGAUUGCGCCCUGGAUCCUUUAUCUG |
| | | AAACAAAGUGCACCCUGAAGUCCUUCACCGUUGAAAAGGGCAUUUACCAAACAUCCAAUUUUAGGGUUCAGCCUAC |
| | | UGAAUCCAUCGUGCGCUUUCCCAACAUCACUAACUUGUGUCCCUUUGGCGAGGUGUUUAACGCCACUCGCUUUG |
| | | CCUCUGUGUACGCCUGGAACAGAAAGAGAAUUUCCAAUUGCGUGGCUGAUUAUUCUGUGCUGUAUAACUCCGCUU |
| | | CUUUCUCCACCUUUAAGUGUUACGGAGUGUCCCCUACUAAACUGAACGACUUGUGCUUCACCAACGUUUACGCCG |
| | | AUUCUUUUGUGAUUCGCGGCGACGAAGUUAGACAAAUCGCCCCCGGACAGACCGGAAAGAUCGCUGAUUACAACU |
| | | AUAAGUUACCUGACGACUUCACCGGCUGCGUGAUUGCUUGGAAUUCUAAUAACUUAGACUCUAAAGUUGGAGGCA |
| | | ACUACAAUUACCUGUAUAGAUUAUUCCGCAAAUCUAACCUGAAACCUUUUGAGAGAGACAUCUCCACCGAAAUUUA |
| | | CCAAGCCGGCUCUACCCCCUGCAACGGAGUUGAAGGAUUUAAUUGCUACUUUCCCCUGCAGUCCUACGGAUUCCA |
| | | ACCUACUAACGGCGUUGGAUACCAACCUUACAGAGUUGUGGUGCUGUCUUUUGAAUUAUUACACGCCCCUGCCAC |
| | | CGUUUGUGGCCCUAAGAAAUCUACCAAUCUGGUUAAAAACAAGUGUGUGAAUUUUAAUUUUAACGGCCUGACCGG |
| | | CACUGGCGUUUUAACCGAGUCUAACAAGAAGUUUCUGCCUUUCCAACAAUUUGGCAGAGACAUCGCCGACACCAC |
| | | CGACGCUGUGCGCGAUCCUCAAACCUUAGAAAUUUUAGAUAUUACUCCUUGCUCUUUCGGCGGCGUUUCCGUUAU |
| | | UACUCCUGGAACCAAUACCUCUAAUCAAGUGGCUGUGCUGUACCAGGACGUUAAUUGCACUGAAGUGCCUGUGGC |
| | | UAUUCACGCCGAUCAACUGACCCCCACUUGGAGAGUUUAUUCUACUGGAUCUAACGUGUUCCAAACUAGAGCUGG |
| | | CUGUCUGAUCGGCGCCGAGCACGUUAAUAAUUCUUACGAGUGUGAUAUCCCUAUUGGCGCUGGCAUUUGCGCCU |
| | | CUUACCAGACCCAGACCAACUCCCCCCGCAGAGCUAGAUCCGUGGCCUCUCAGUCCAUUAUUGCCUAUACUAUGU |
| | | CCUUAGGAGCCGAAAAUUCUGUGGCUUACUCCAACAAUUCUAUUGCCAUUCCCACUAAUUUUACUAUCUCUGUGA |
| | | CUACCGAAAUCCUGCCCGUGUCCAUGACUAAGACCUCCGUGGACUGCACCAUGUAUAUCUGCGGAGACUCUACUG |
| | | AGUGUUCCAACUUAUUACUGCAGUACGGCUCUUUCUGUACUCAGCUGAAUAGAGCCCUGACUGGAAUUGCUGUG |
| | | GAGCAAGACAAAAAUACCCAGGAGGUGUUCGCUCAGGUGAAACAAAUUUAUAAGACCCCUCCCAUCAAAGAUUUUG |
| | | GAGGCUUCAAUUUUUCUCAAAUUCUGCCCGACCCCUCCAAGCCUUCCAAAAGAUCCUUUAUUGAAGAUCUGCUGU |
| | | UCAAUAAGGUUACUUUAGCCGACGCCGGCUUCAUUAAGCAGUACGGAGAUUGUCUGGGCGAUAUUGCUGCCCGC |
| | | GACCUGAUUUGCGCUCAGAAGUUCAACGGAUUAACCGUUCUGCCUCCUCUGCUGACUGACGAGAUGAUUGCUCA |
| | | GUAUACUUCUGCCCUGCUGGCUGGAACUAUUACCUCUGGCUGGACCUUCGGCGCCGGAGCUGCUCUGCAAAUUC |
| | | CCUUCGCCAUGCAAAUGGCUUACAGAUUUAACGGCAUCGGAGUUACUCAAAACGUGCUGUACGAAAACCAAAAAUU |
| | | AAUUGCCAACCAGUUCAAUUCCGCUAUCGGCAAAAUUCAGGAUUCUCUGUCUUCUACUGCUUCCGCUUUAGGCAA |
| | | ACUGCAAGACGUUGUUAACCAGAACGCCCAAGCUUUAAACACCCUGGUUAAGCAGCUGUCCUCUAAUUUUGGCGC |
| | | UAUCUCUUCUGUUCUGAACGACAUUUUAUCUAGACUGGACCCCCCUGAAGCCGAGGUGCAGAUUGAUAGAUUAAU |
| | | CACCGGAAGACUGCAAUCCCUGCAGACCUACGUUACCCAGCAAUUAAUCAGAGCCGCCGAGAUCAGAGCCUCUGC |
| | | CAACUUAGCUGCCACCAAAAUGUCCGAGUGUGUGCUGGGACAGUCCAAGCGCGUGGACUUCUGUGGAAAGGGAU |
| | | ACCACCUGAUGUCUUUUCCUCAAUCUGCUCCCCACGGAGUUGUGUUUCUGCACGUUACUUACGUGCCUGCCCAA |
| | | GAGAAAAACUUUACUACCGCCCCCGCUAUUUGCCACGACGGCAAGGCUCACUUCCCUAGAGAAGGAGUUUUUGUG |
| | | UCUAACGGAACCCAUUGGUUUGUGACUCAAAGAAAUUUUUACGAGCCUCAAAUCAUUACCACCGAUAACACUUUUG |
| | | UUUCCGGCAAUUGUGACGUGGUGAUUGGAAUCGUUAACAACACCGUUUACGACCCUUUACAGCCCGAAUUAGACU |
| | | CUUUUAAAGAGGAGUUAGAUAAAUAUUUUAAAAACCAUACCUCUCCCGACGUGGACCUGGGAGAUAUUUCCGGAA |
| | | UUAACGCUUCUGUUGUGAAUAUCCAGAAAGAGAUCGACAGAUUAAACGAGGUUGCUAAAAAUUUAAACGAAUCCCU |
| | | GAUUGACCUGCAGGAGCUGGGCAAAUACGAACAAUAUAUUAAGUGGCCUUGGUAUAUUUGGUUAGGCUUCAUCGC |
| | | UGGAUUAAUCGCUAUUGUUAUGGUGACUAUUAUGUUGUGUUGUAUGACUUCCUGCUGUUCUUGCUUAAAAGGCU |
| | | GCUGUUCCUGCGGAUCCUGUUGUAAAUUCGACGAGGACGAUUCCGAGCCUGUUUUAAAAGGAGUGAAAUUACAUU |
| | | AUACUUAAAUGAGACCAUA |
| 149 | 2A6581 | AUAGGUCUCACACAUUAAAACAGCCUGUGGGUUGAUCCCACCCACAGGCCCAUUGGGCGCUAGCACUCUGGUAUC |
| | | ACGGUACCUUUGUGCGCCUGUUUUAUACCCCCUCCCCCAACUGUAACUUAGAAGUAACACACACCGAUCAACAGU |
| | | CAGCGUGGCACACCAGCCACGUUUUGAUCAAGCACUUCUGUUACCCCGGACUGAGUAUCAAUAGACUGCUCACGC |
| | | GGUUGAAGGAGAAAGCGUUCGUUAUCCGGCCAACUACUUCGAAAAACCUAGUAACACCGUGGAAGUUGCAGAGUG |
| | | UUUCGCUCAGCACUACCCCAGUGUAGAUCAGGUCGAUGAGUCACCGCAUUCCCCACGGGCGACCGUGGCGGUGG |
| | | CUGCGUUGGCGGCCUGCCCAUGGGGAAACCCAUGGGACGCUCUAAUACAGACAUGGUGCGAAGAGUCUAUUGAG |
| | | CUAGUUGGUAGUCCUCCGGCCCCUGAAUGCGGCUAAUCCUAACUGCGGAGCACACACCCUCAAGCCAGAGGGCA |
| | | GUGUGUCGUAACGGGCAACUCUGCAGCGGAACCGACUACUUUGGGUGUCCGUGUUUCAUUUUAUUCCUAUACUG |
| | | GCUGCUUAUGGUGACAAUUGAGAGAUCGUUACCAUAUAGCUAUUGGAUUGGCCAUCCGGUGACUAAUAGAGCUAU |
| | | UAUAUAUCCCUUUGUUGGGUUUAUACCACUUAGCUUGAAAGAGGUUAAAACAUUACAAUUCAUUGUUAAGUUGAAU |
| | | ACAGCAACAUGUUCGUGUUCCUGGUGCUGCUGCCCUUAGUGUCCUCCCAGUGUGUGAACCUGACCACCAGAACC |
| | | CAGUUACCUCCCGCUUACACCAACUCCUUUACCCGCGGAGUGUACUACCCUGAUAAGGUUUUUAGAUCCUCCGUU |
| | | CUGCAUUCUACCCAAGACCUGUUUUUACCCUUCUUUUCCAACGUGACCUGGUUCCACGCUAUCCACGUGUCCGGC |
| | | ACUAACGGCACUAAGCGCUUCGACAAUCCUGUGCUCCCUUUUAACGACGGCGUGUACUUCGCUUCUACCGAAAAA |
| | | UCCAACAUCAUCCGCGGCUGGAUCUUCGGAACUACCCUGGAUUCUAAAACCCAGUCUUUAUUAAUCGUGAAUAAC |
| | | GCCACCAACGUGGUUAUUAAGGUCUGUGAGUUCCAAUUUUGCAACGACCCUUUCUUAGGCGUUUAUUACCACAAA |
| | | AACAAUAAGUCUUGGAUGGAGUCCGAAUUCCGCGUGUACUCCUCUGCCAACAAUUGCACCUUUGAGUACGUGUCC |
| | | CAGCCCUUCCUGAUGGACCUGGAAGGCAAGCAGGGCAAUUUUAAAAAUCUGCGCGAAUUCGUUUUCAAGAACAUC |
| | | GACGGCUACUUUAAGAUUUAUUCCAAACAUACCCCCAUCAACCUGGUGCGCGAUUUACCCCAGGGCUUCUCCGCC |
| | | UUAGAGCCCUUAGUGGAUCUGCCUAUCGGCAUCAAUAUCACCCGCUUUCAGACUCUGCUGGCCCUGCACAGAUCC |
| | | UACCUGACUCCCGGAGACUCUUCUUCUGGCUGGACCGCCGGAGCUGCCGCCUACUACGUGGGCUACCUGCAACC |
| | | CCGCACCUUUCUGCUGAAGUACAACGAAAACGGCACCAUCACAGACGCCGUUGACUGCGCUCUGGACCCCCUGUC |
| | | UGAGACUAAGUGCACCCUGAAGUCCUUCACUGUGGAGAAAGGAAUCUACCAGACCUCCAACUUCCGCGUGCAGCC |
| | | UACCGAAUCCAUUGUUCGCUUCCCUAACAUUACUAAUCUGUGCCCCUUCGGAGAAGUUUUCAACGCCACUAGAUU |
| | | CGCUUCCGUGUACGCCUGGAAUCGCAAGCGCAUCUCCAAUUGCGUUGCUGACUACUCUGUGUUAUACAAUUCCG |
| | | CCUCUUUUUCCACUUUCAAGUGCUACGGCGUGUCUCCUACCAAGCUGAACGACCUGUGUUUCACUAACGUGUACG |
| | | CUGAUUCCUUUGUUAUCCGCGGCGACGAGGUGAGACAGAUCGCCCCUGGCCAGACCGGAAAAAUCGCCGACUAC |
| | | AACUACAAGUUACCCGACGAUUUUACCGGCUGUGUUAUUGCUUGGAACUCUAAUAAUCUGGACUCUAAAGUGGGC |
| | | GGCAAUUACAACUACUUAUAUCGCCUGUUCAGAAAAUCCAACCUGAAACCCUUCGAACGGGACAUUUCCACCGAAA |
| | | UUUAUCAGGCCGGCUCCACCCCCUGCAACGGAGUGGAGGGCUUCAAUUGCUACUUCCCCCUGCAAUCCUACGGC |
| | | UUUCAGCCCACCAACGGCGUGGGAUACCAGCCCUACCGCGUUGUUGUGUUAUCCUUUGAACUGCUGCACGCUCC |
| | | UGCUACUGUGUGCGGACCUAAAAAAUCCACCAAUCUGGUGAAGAACAAGUGUGUGAAUUUUAAUUUUAACGGCCU |
| | | GACCGGCACCGGAGUGCUGACCGAGUCCAACAAAAAGUUUCUGCCCUUUCAGCAGUUCGGCCGGGACAUUGCCG |
| | | ACACUACCGACGCUGUGAGGGAUCCUCAGACCCUGGAGAUUCUGGACAUUACCCCUUGCUCCUUCGGAGGAGUU |
| | | UCCGUGAUCACCCCUGGCACCAAUACUUCUAACCAAGUGGCUGUUUUAUACCAGGACGUGAAUUGUACUGAGGUG |
| | | CCUGUGGCCAUCCACGCCGAUCAAUUAACUCCCACCUGGAGAGUGUAUUCCACCGGCUCUAACGUUUUCCAAACC |
| | | CGCGCUGGCUGCUUAAUCGGCGCUGAGCACGUGAACAACUCCUACGAGUGUGAUAUUCCUAUCGGAGCCGGCAU |
| | | CUGUGCUUCCUACCAGACUCAGACCAACUCCCCCAGACGCGCUAGGUCCGUGGCUUCCCAGUCUAUUAUCGCUUA |
| | | UACUAUGUCCCUGGGAGCCGAGAAUUCUGUUGCCUAUUCCAAUAACUCCAUCGCCAUUCCUACCAACUUUACCAU |
| | | CUCUGUGACCACCGAGAUUCUGCCCGUGUCCAUGACCAAAACUUCUGUGGAUUGUACCAUGUACAUCUGUGGAGA |
| | | UUCCACCGAGUGCUCUAACCUGCUGCUGCAGUACGGCUCCUUUUGCACCCAAUUAAACCGCGCUCUGACUGGCAU |
| | | CGCCGUGGAGCAAGAUAAAAACACCCAAGAGGUGUUCGCUCAGGUGAAGCAGAUCUACAAGACACCUCCCAUUAA |
| | | AGAUUUCGGAGGCUUUAAUUUCUCUCAGAUCCUGCCCGACCCUUCUAAGCCCUCUAAACGCUCCUUCAUCGAGGA |
| | | UCUGCUGUUCAACAAGGUUACCCUGGCCGACGCUGGCUUUAUCAAACAGUACGGCGACUGCUUAGGCGACAUCG |
| | | CCGCCCGCGAUUUAAUUUGCGCUCAGAAGUUCAACGGACUGACCGUGCUGCCUCCUCUGCUGACCGACGAAAUG |
| | | AUCGCCCAAUACACCUCCGCCCUGCUGGCUGGCACUAUCACCUCCGGCUGGACCUUUGGCGCUGGAGCCGCUCU |
| | | GCAAAUCCCUUUCGCUAUGCAGAUGGCUUACCGCUUUAACGGAAUCGGCGUGACCCAGAACGUGUUAUACGAAAA |
| | | UCAGAAAUUAAUUGCCAAUCAAUUUAACUCUGCCAUCGGCAAGAUUCAGGAUUCUCUGUCUUCUACUGCCUCUGC |
| | | CUUAGGAAAACUGCAGGACGUGGUGAAUCAGAACGCCCAGGCCCUGAAUACCCUGGUUAAGCAACUGUCUUCCAA |
| | | UUUCGGCGCUAUCUCCUCUGUGUUAAACGACAUUCUGUCCCGCCUGGAUCCUCCUGAGGCCGAAGUGCAAAUUG |
| | | ACCGCUUAAUCACUGGCAGACUGCAAUCCCUGCAAACCUACGUUACUCAACAGCUGAUCAGAGCCGCCGAAAUCC |
| | | GCGCUUCUGCCAACUUAGCUGCUACCAAGAUGUCCGAGUGCGUGCUGGGACAGUCCAAAAGAGUUGACUUUUGC |
| | | GGAAAGGGCUACCACCUGAUGUCCUUUCCCCAGUCCGCCCCCCACGGAGUUGUUUUCCUGCACGUUACUUACGU |
| | | UCCUGCUCAAGAGAAGAACUUCACCACCGCUCCCGCUAUUUGCCACGACGGCAAGGCUCAUUUCCCCAGAGAGGG |
| | | AGUGUUUGUGUCCAACGGCACUCACUGGUUUGUUACUCAGCGCAACUUCUACGAACCUCAGAUCAUCACCACUGA |
| | | CAAUACCUUUGUGUCCGGAAACUGUGACGUGGUUAUCGGCAUUGUGAACAAUACUGUGUACGACCCUUUACAACC |
| | | UGAGCUGGAUUCUUUUAAAGAAGAACUGGACAAGUACUUCAAGAACCACACCUCCCCCGACGUGGAUCUGGGCGA |
| | | CAUCUCCGGCAUCAACGCCUCUGUGGUGAAUAUUCAGAAGGAGAUUGAUCGCCUGAACGAGGUUGCCAAGAAUCU |
| | | GAACGAGUCUCUGAUCGACCUGCAGGAGCUGGGCAAGUACGAACAGUACAUCAAGUGGCCCUGGUACAUUUGGC |
| | | UGGGCUUUAUUGCUGGACUGAUCGCUAUCGUUAUGGUUACCAUCAUGCUGUGCUGUAUGACCUCUUGCUGCUCC |
| | | UGUCUGAAAGGCUGUUGCUCCUGCGGCUCCUGUUGUAAGUUUGACGAGGACGACUCCGAGCCUGUUCUGAAAGG |
| | | AGUUAAACUGCACUACACCUAAAUGAGACCAUA |
| 150 | 2A7581 | AUAGGUCUCACACAUUAAAACAGCCUGUGGGUUGAUCCCACCCACAGGCCCAUUGGGCGCUAGCACUCUGGUAUC |
| | | ACGGUACCUUUGUGCGCCUGUUUUAUACCCCCUCCCCCAACUGUAACUUAGAAGUAACACACACCGAUCAACAGU |
| | | CAGCGUGGCACACCAGCCACGUUUUGAUCAAGCACUUCUGUUACCCCGGACUGAGUAUCAAUAGACUGCUCACGC |
| | | GGUUGAAGGAGAAAGCGUUCGUUAUCCGGCCAACUACUUCGAAAAACCUAGUAACACCGUGGAAGUUGCAGAGUG |
| | | UUUCGCUCAGCACUACCCCAGUGUAGAUCAGGUCGAUGAGUCACCGCAUUCCCCACGGGCGACCGUGGCGGUGG |
| | | CUGCGUUGGCGGCCUGCCCAUGGGGAAACCCAUGGGACGCUCUAAUACAGACAUGGUGCGAAGAGUCUAUUGAG |
| | | CUAGUUGGUAGUCCUCCGGCCCCUGAAUGCGGCUAAUCCUAACUGCGGAGCACACACCCUCAAGCCAGAGGGCA |
| | | GUGUGUCGUAACGGGCAACUCUGCAGCGGAACCGACUACUUUGGGUGUCCGUGUUUCAUUUUAUUCCUAUACUG |
| | | GCUGCUUAUGGUGACAAUUGAGAGAUCGUUACCAUAUAGCUAUUGGAUUGGCCAUCCGGUGACUAAUAGAGCUAU |
| | | UAUAUAUCCCUUUGUUGGGUUUAUACCACUUAGCUUGAAAGAGGUUAAAACAUUACAAUUCAUUGUUAAGUUGAAU |
| | | ACAGCAACAUGUUUGUGUUUCUGGUGCUGCUGCCUCUGGUGUCCUCUCAGUGUGUUAACCUGACCACCAGAACC |
| | | CAACUGCCCCCCGCCUACACUAACUCUUUCACUCGCGGCGUGUACUACCCCGAUAAAGUUUUCAGAUCCUCCGUG |
| | | CUCCAUUCUACCCAAGACCUGUUCUUACCCUUUUUCUCCAACGUGACCUGGUUCCACGCCAUCCACGUGUCCGGC |
| | | ACUAACGGAACCAAGCGCUUCGAUAAUCCCGUGCUGCCUUUCAACGACGGAGUUUACUUUGCUUCCACCGAGAAG |
| | | UCCAAUAUUAUCCGGGGCUGGAUCUUCGGCACCACACUGGAUUCCAAAACCCAGUCCUUACUGAUUGUGAACAAC |
| | | GCCACUAACGUGGUGAUCAAGGUGUGUGAGUUCCAGUUCUGUAACGACCCCUUUCUGGGCGUGUAUUAUCAUAA |
| | | AAACAACAAGUCCUGGAUGGAGUCCGAGUUUAGAGUGUAUUCUUCCGCUAACAACUGCACCUUCGAAUACGUGUC |
| | | CCAGCCUUUCCUGAUGGAUCUGGAAGGAAAGCAGGGCAACUUCAAGAACUUACGCGAGUUCGUGUUCAAGAACAU |
| | | CGACGGCUACUUCAAAAUUUACUCCAAGCACACCCCUAUCAACUUAGUGAGAGAUCUGCCCCAGGGCUUCUCCGC |
| | | UCUGGAACCUCUGGUGGACUUACCCAUUGGCAUCAACAUCACUCGCUUCCAAACACUGCUCGCUCUGCACCGCUC |
| | | UUAUCUGACCCCCGGCGACUCCUCUUCUGGCUGGACCGCCGGCGCCGCUGCCUAUUACGUGGGAUACCUGCAAC |
| | | CCCGCACCUUUCUGCUGAAAUACAACGAAAACGGCACCAUCACAGACGCUGUGGACUGCGCUCUGGACCCCCUGU |
| | | CCGAGACUAAGUGCACCCUGAAGUCCUUCACCGUUGAAAAGGGCAUUUAUCAGACUUCCAACUUCCGCGUGCAGC |
| | | CUACUGAGUCCAUUGUGCGCUUCCCUAACAUCACUAACUUGUGUCCUUUCGGCGAAGUGUUCAACGCUACUCGCU |
| | | UCGCCUCCGUGUACGCCUGGAACCGCAAGAGAAUCUCCAAUUGCGUGGCCGACUACUCUGUUCUCUACAACUCUG |
| | | CCUCCUUCUCCACCUUUAAGUGCUACGGCGUGUCCCCCACCAAACUGAACGACCUGUGCUUCACCAACGUGUACG |
| | | CCGACUCCUUUGUGAUCAGAGGCGACGAGGUGCGCCAGAUCGCCCCCGGCCAGACUGGCAAGAUCGCCGAUUAC |
| | | AAUUACAAGCUGCCUGACGACUUUACCGGCUGCGUGAUUGCCUGGAACUCCAACAACCUGGACUCCAAAGUGGGC |
| | | GGCAACUACAACUACCUGUACCGCCUGUUUAGAAAAUCCAACCUGAAGCCCUUCGAGCGGGACAUUUCUACUGAG |
| | | AUCUACCAGGCCGGCUCCACCCCCUGUAACGGCGUGGAAGGCUUCAACUGCUACUUUCCCCUGCAGUCCUACGG |
| | | CUUCCAGCCUACCAACGGCGUGGGCUACCAGCCCUACCGCGUGGUGGUGUUAUCCUUCGAGCUGCUGCACGCCC |
| | | CUGCCACCGUGUGCGGACCCAAAAAGUCUACUAACCUGGUUAAGAAUAAGUGUGUUAAUUUCAAUUUUAACGGCU |
| | | UAACCGGAACCGGAGUGCUGACCGAGUCCAAUAAAAAGUUCCUGCCCUUUCAGCAGUUUGGCCGCGACAUCGCCG |
| | | AUACUACCGACGCCGUGCGCGAUCCCCAGACCCUGGAGAUCCUGGACAUUACCCCCUGCUCUUUCGGCGGAGUG |
| | | UCCGUGAUCACCCCCGGCACCAAUACCUCCAAUCAGGUGGCCGUUCUGUACCAGGACGUGAAUUGCACCGAAGUG |
| | | CCCGUGGCCAUUCACGCCGACCAGUUAACUCCUACUUGGAGAGUGUACUCCACCGGCUCUAACGUGUUUCAGACC |
| | | CGCGCCGGCUGUCUGAUCGGCGCCGAGCACGUGAACAACUCCUACGAGUGCGACAUUCCCAUUGGCGCCGGCAU |
| | | CUGCGCCUCCUACCAAACCCAGACUAACUCUCCCAGACGCGCCCGCUCUGUGGCCUCUCAGUCCAUCAUCGCUUA |
| | | CACUAUGUCCCUGGGCGCCGAGAACUCCGUGGCCUAUUCCAACAACUCCAUCGCCAUCCCCACUAACUUCACCAU |
| | | CUCUGUGACCACCGAAAUCCUCCCCGUGUCUAUGACUAAGACUUCCGUGGACUGUACCAUGUACAUUUGCGGCGA |
| | | CUCCACCGAGUGUUCCAAUCUGCUGCUGCAGUACGGCUCCUUUUGCACCCAGCUGAACCGCGCCCUGACCGGCA |
| | | UCGCUGUUGAGCAGGACAAGAAUACCCAGGAGGUGUUUGCUCAGGUGAAGCAAAUCUAUAAGACCCCUCCCAUCA |
| | | AGGACUUUGGCGGCUUCAACUUUUCCCAGAUCCUGCCCGACCCUUCCAAGCCCUCCAAACGCUCUUUCAUCGAAG |
| | | AUCUGCUGUUCAAUAAAGUGACCCUGGCCGACGCCGGCUUCAUCAAGCAGUACGGAGACUGUCUGGGAGACAUU |
| | | GCUGCUCGCGACCUGAUUUGCGCCCAGAAGUUCAACGGCCUGACCGUGCUGCCCCCUCUGCUGACCGACGAGAU |
| | | GAUCGCUCAGUACACCUCCGCCCUGCUGGCUGGCACUAUCACCUCCGGCUGGACUUUCGGCGCUGGCGCCGCCC |
| | | UGCAGAUUCCCUUCGCCAUGCAGAUGGCUUAUCGCUUCAACGGAAUCGGAGUGACACAGAACGUGCUGUACGAGA |
| | | AUCAGAAACUGAUCGCUAACCAGUUUAAUUCCGCCAUUGGCAAGAUCCAGGACUCCCUGUCCUCUACUGCUUCCG |
| | | CCCUGGGCAAGCUGCAGGACGUGGUGAACCAGAACGCCCAGGCUCUGAACACCCUGGUGAAGCAACUGUCUUCU |
| | | AACUUUGGAGCCAUUUCUUCCGUGCUGAACGACAUCCUGUCCAGACUGGAUCCUCCUGAGGCCGAGGUGCAGAU |
| | | CGACCGCCUGAUCACUGGCCGCCUGCAGUCCCUGCAGACUUACGUUACCCAGCAAUUAAUCCGCGCUGCCGAGA |
| | | UCCGCGCCUCCGCCAACCUGGCCGCCACCAAGAUGUCCGAGUGCGUUCUGGGCCAGUCCAAACGCGUUGACUUC |
| | | UGCGGCAAGGGCUACCACCUGAUGUCCUUCCCCCAGUCCGCUCCCCACGGAGUGGUGUUCCUGCACGUGACCUA |
| | | CGUGCCUGCCCAGGAGAAGAACUUCACCACCGCCCCCGCCAUUUGCCACGACGGAAAGGCCCACUUCCCCCGCGA |
| | | GGGAGUGUUCGUUUCUAACGGCACUCACUGGUUCGUGACCCAGAGAAACUUCUACGAGCCCCAGAUUAUUACCAC |
| | | CGACAAUACCUUCGUUUCUGGCAACUGCGACGUGGUUAUCGGCAUCGUGAACAACACCGUGUACGACCCCCUGCA |
| | | ACCCGAGCUGGAUUCUUUCAAGGAGGAGCUGGAUAAGUACUUUAAAAACCAUACCUCCCCCGACGUGGACCUGGG |
| | | CGACAUCUCUGGCAUCAACGCCUCCGUGGUGAAUAUCCAGAAGGAGAUCGAUCGCCUGAACGAGGUGGCCAAGAA |
| | | CUUAAACGAAUCUCUGAUCGACCUGCAGGAGCUGGGCAAGUACGAGCAGUAUAUUAAGUGGCCCUGGUAUAUCUG |
| | | GUUAGGCUUUAUCGCCGGCCUGAUCGCCAUUGUUAUGGUGACCAUCAUGCUGUGCUGCAUGACCUCCUGCUGUU |
| | | CCUGUUUAAAAGGCUGCUGCUCCUGCGGAUCCUGCUGUAAAUUCGACGAAGACGACUCCGAGCCCGUGCUGAAA |
| | | GGAGUUAAGUUACACUAUACCUAAAUGAGACCAUA |
| 151 | 2A8581 | AUAGGUCUCACACAUUAAAACAGCCUGUGGGUUGAUCCCACCCACAGGCCCAUUGGGCGCUAGCACUCUGGUAUC |
| | | ACGGUACCUUUGUGCGCCUGUUUUAUACCCCCUCCCCCAACUGUAACUUAGAAGUAACACACACCGAUCAACAGU |
| | | CAGCGUGGCACACCAGCCACGUUUUGAUCAAGCACUUCUGUUACCCCGGACUGAGUAUCAAUAGACUGCUCACGC |
| | | GGUUGAAGGAGAAAGCGUUCGUUAUCCGGCCAACUACUUCGAAAAACCUAGUAACACCGUGGAAGUUGCAGAGUG |
| | | UUUCGCUCAGCACUACCCCAGUGUAGAUCAGGUCGAUGAGUCACCGCAUUCCCCACGGGCGACCGUGGCGGUGG |
| | | CUGCGUUGGCGGCCUGCCCAUGGGGAAACCCAUGGGACGCUCUAAUACAGACAUGGUGCGAAGAGUCUAUUGAG |
| | | CUAGUUGGUAGUCCUCCGGCCCCUGAAUGCGGCUAAUCCUAACUGCGGAGCACACACCCUCAAGCCAGAGGGCA |
| | | GUGUGUCGUAACGGGCAACUCUGCAGCGGAACCGACUACUUUGGGUGUCCGUGUUUCAUUUUAUUCCUAUACUG |
| | | GCUGCUUAUGGUGACAAUUGAGAGAUCGUUACCAUAUAGCUAUUGGAUUGGCCAUCCGGUGACUAAUAGAGCUAU |
| | | UAUAUAUCCCUUUGUUGGGUUUAUACCACUUAGCUUGAAAGAGGUUAAAACAUUACAAUUCAUUGUUAAGUUGAAU |
| | | ACAGCAACAUGUUCGUGUUCCUGGUGCUGCUGCCCCUGGUGUCCUCCCAGUGCGUCAACCUGACCACCCGGACC |
| | | CAACUGCCCCCUGCCUAUACCAAUUCCUUCACCCGGGGCGUCUACUACCCCGACAAGGUGUUCCGGUCCUCUGU |
| | | GCUCCACUCCACCCAGGACCUCUUCCUCCCCUUUUUCUCCAACGUGACCUGGUUCCACGCCAUCCACGUGUCUG |
| | | GCACAAACGGAACCAAGCGCUUCGACAACCCUGUGCUCCCCUUCAACGACGGCGUGUACUUCGCCUCCACCGAGA |
| | | AGUCCAACAUCAUCCGCGGCUGGAUCUUCGGCACCACCCUCGACUCUAAGACCCAGUCCCUGCUGAUUGUGAAUA |
| | | ACGCCACCAACGUGGUGAUCAAGGUGUGCGAAUUUCAGUUCUGCAACGACCCCUUCCUGGGCGUUUACUACCAUA |
| | | AGAACAACAAGUCCUGGAUGGAGUCCGAGUUCCGGGUGUAUUCCUCUGCCAAUAACUGCACCUUUGAGUACGUGU |
| | | CCCAGCCCUUCCUGAUGGACCUGGAGGGCAAGCAGGGCAAUUUUAAAAACCUGCGCGAGUUCGUGUUCAAGAACA |
| | | UCGACGGCUACUUCAAGAUCUAUUCCAAGCACACCCCUAUCAACCUGGUGCGCGACCUGCCCCAGGGCUUUUCCG |
| | | CUCUGGAGCCCCUGGUUGACCUGCCCAUCGGCAUCAACAUCACCCGCUUCCAGACUUUACUGGCCCUGCACCGC |
| | | UCCUACCUGACCCCCGGCGAUUCCUCUUCUGGCUGGACAGCCGGAGCCGCUGCCUACUACGUGGGAUACCUGCA |
| | | GCCCCGCACCUUCCUGCUGAAGUACAACGAGAACGGAACCAUUACAGACGCUGUCGACUGUGCUCUGGAUCCCCU |
| | | GUCCGAAACAAAGUGCACCCUGAAGUCCUUCACCGUGGAGAAGGGCAUCUACCAGACCUCCAACUUCCGCGUGCA |
| | | GCCCACCGAGUCCAUCGUGAGAUUCCCCAACAUCACUAACCUGUGCCCCUUCGGCGAGGUGUUCAACGCCACCCG |
| | | CUUCGCCUCCGUGUACGCCUGGAACCGCAAGCGCAUCUCCAACUGCGUUGCCGACUACUCUGUGCUCUACAACU |
| | | CCGCCUCCUUCUCCACCUUCAAGUGCUACGGCGUGUCCCCCACCAAGCUGAACGACCUGUGCUUCACCAACGUGU |
| | | ACGCCGACUCCUUCGUGAUCCGCGGCGACGAGGUGCGCCAGAUCGCCCCCGGCCAGACCGGAAAGAUCGCCGAU |
| | | UACAAUUACAAGCUGCCCGACGACUUCACCGGCUGCGUGAUCGCCUGGAACUCCAACAAUCUGGACUCCAAGGUU |
| | | GGCGGCAACUACAACUACCUGUACCGCCUGUUCCGCAAGUCCAACCUGAAGCCCUUCGAGCGGGACAUUUCCACA |
| | | GAGAUUUACCAGGCUGGCUCCACCCCCUGUAACGGAGUGGAGGGCUUCAACUGCUACUUCCCCCUGCAGUCCUA |
| | | CGGCUUCCAGCCCACCAACGGCGUGGGCUACCAGCCCUACCGCGUGGUGGUGCUGUCCUUCGAGCUGCUGCACG |
| | | CCCCUGCCACCGUGUGCGGCCCCAAGAAGUCCACCAACCUGGUGAAGAACAAGUGCGUGAACUUCAACUUCAACG |
| | | GACUGACAGGCACCGGCGUGCUGACCGAGUCCAACAAGAAGUUCCUGCCCUUCCAGCAGUUCGGCCGGGACAUU |
| | | GCCGACACCACCGACGCCGUGCGCGACCCCCAGACCCUGGAGAUCCUGGACAUCACCCCCUGCUCCUUCGGCGG |
| | | AGUGUCCGUGAUCACCCCCGGCACCAACACCUCCAACCAGGUUGCCGUGCUGUACCAGGACGUUAACUGCACCGA |
| | | GGUGCCCGUGGCCAUCCACGCCGACCAGCUGACCCCCACCUGGCGCGUGUACUCCACCGGCUCCAACGUGUUCC |
| | | AGACCCGCGCCGGCUGCCUGAUCGGCGCCGAGCACGUGAACAACUCCUACGAGUGCGACAUCCCCAUUGGCGCC |
| | | GGCAUCUGCGCCUCCUACCAGACCCAGACCAACUCCCCUCGCCGCGCCCGGUCCGUCGCCUCCCAGUCCAUCAU |
| | | CGCCUACACCAUGUCCCUGGGCGCCGAGAACUCCGUGGCCUACUCCAACAACUCCAUUGCCAUCCCCACCAACUU |
| | | CACCAUCUCCGUGACCACCGAAAUCCUCCCCGUGUCCAUGACCAAGACCUCCGUGGACUGCACCAUGUACAUCUG |
| | | CGGCGACUCCACCGAGUGCUCCAACCUGCUGCUGCAGUACGGCUCCUUCUGCACCCAGCUGAAUCGCGCCCUGA |
| | | CCGGCAUCGCCGUGGAGCAGGACAAGAACACCCAAGAGGUGUUCGCCCAGGUGAAGCAGAUCUACAAGACACCUC |
| | | CCAUCAAGGACUUCGGCGGCUUCAACUUCUCCCAGAUCCUGCCCGACCCCUCCAAGCCCUCCAAGCGCUCCUUCA |
| | | UCGAGGACCUGCUGUUCAACAAGGUGACCCUGGCCGACGCCGGCUUCAUCAAGCAGUACGGCGACUGUCUGGGA |
| | | GACAUUGCCGCCCGCGACCUGAUCUGCGCCCAGAAGUUCAACGGCUUAACCGUGCUGCCCCCUCUGCUGACCGA |
| | | CGAGAUGAUCGCCCAGUACACAUCCGCUCUGCUGGCCGGCACCAUCACCUCCGGCUGGACCUUUGGCGCUGGCG |
| | | CUGCCCUGCAGAUCCCCUUCGCUAUGCAGAUGGCCUACCGCUUCAACGGCAUCGGCGUGACCCAGAACGUGCUG |
| | | UACGAGAACCAGAAGCUGAUCGCCAACCAGUUCAACUCCGCCAUCGGCAAGAUCCAGGACUCCCUGUCCUCCACC |
| | | GCCUCCGCCCUGGGCAAGCUGCAGGACGUGGUGAACCAGAACGCCCAGGCCCUGAACACCCUGGUGAAGCAGCU |
| | | GUCCUCUAACUUCGGCGCCAUCUCCUCCGUGCUGAACGACAUUCUGUCCCGCCUGGAUCCUCCUGAGGCCGAGG |
| | | UGCAAAUCGAUCGCCUCAUCACCGGCCGCCUGCAGUCCCUGCAGACCUACGUGACACAGCAGCUGAUCCGCGCC |
| | | GCCGAGAUCCGCGCCUCCGCCAACCUGGCCGCCACCAAGAUGUCUGAGUGCGUGCUGGGCCAGUCCAAACGCGU |
| | | UGACUUCUGCGGCAAGGGCUACCACCUGAUGUCCUUCCCCCAGUCCGCCCCCCACGGCGUGGUGUUCCUGCACG |
| | | UGACCUACGUGCCCGCCCAGGAGAAGAACUUCACUACCGCCCCCGCCAUCUGCCACGACGGCAAGGCCCACUUCC |
| | | CCCGCGAGGGCGUGUUCGUGUCCAACGGCACCCACUGGUUCGUGACCCAGCGCAACUUCUACGAGCCCCAGAUC |
| | | AUCACCACCGACAACACCUUCGUGUCCGGCAACUGCGACGUGGUGAUUGGCAUCGUGAACAACACCGUGUACGAC |
| | | CCCCUGCAGCCCGAGCUGGACUCCUUCAAGGAGGAGCUGGACAAGUACUUUAAGAACCACACCUCCCCCGACGUG |
| | | GACCUGGGCGACAUCUCCGGCAUCAACGCCUCCGUGGUGAACAUCCAGAAGGAGAUCGACCGCCUGAACGAGGU |
| | | GGCCAAGAACCUGAACGAGUCCCUGAUCGACCUGCAGGAGCUGGGCAAGUACGAACAGUACAUCAAGUGGCCCUG |
| | | GUACAUCUGGCUGGGCUUCAUCGCCGGCCUGAUCGCCAUCGUGAUGGUGACCAUCAUGCUGUGCUGCAUGACCU |
| | | CUUGCUGUUCCUGUCUGAAGGGCUGCUGCUCCUGCGGCUCCUGCUGCAAGUUCGACGAGGACGACUCCGAGCCC |
| | | GUGCUGAAGGGCGUGAAGCUGCACUACACCUAAAUGAGACCAUA |
| 152 | 2A9581 | AUAGGUCUCACACAUUAAAACAGCCUGUGGGUUGAUCCCACCCACAGGCCCAUUGGGCGCUAGCACUCUGGUAUC |
| | | ACGGUACCUUUGUGCGCCUGUUUUAUACCCCCUCCCCCAACUGUAACUUAGAAGUAACACACACCGAUCAACAGU |
| | | CAGCGUGGCACACCAGCCACGUUUUGAUCAAGCACUUCUGUUACCCCGGACUGAGUAUCAAUAGACUGCUCACGC |
| | | GGUUGAAGGAGAAAGCGUUCGUUAUCCGGCCAACUACUUCGAAAAACCUAGUAACACCGUGGAAGUUGCAGAGUG |
| | | UUUCGCUCAGCACUACCCCAGUGUAGAUCAGGUCGAUGAGUCACCGCAUUCCCCACGGGCGACCGUGGCGGUGG |
| | | CUGCGUUGGCGGCCUGCCCAUGGGGAAACCCAUGGGACGCUCUAAUACAGACAUGGUGCGAAGAGUCUAUUGAG |
| | | CUAGUUGGUAGUCCUCCGGCCCCUGAAUGCGGCUAAUCCUAACUGCGGAGCACACACCCUCAAGCCAGAGGGCA |
| | | GUGUGUCGUAACGGGCAACUCUGCAGCGGAACCGACUACUUUGGGUGUCCGUGUUUCAUUUUAUUCCUAUACUG |
| | | GCUGCUUAUGGUGACAAUUGAGAGAUCGUUACCAUAUAGCUAUUGGAUUGGCCAUCCGGUGACUAAUAGAGCUAU |
| | | UAUAUAUCCCUUUGUUGGGUUUAUACCACUUAGCUUGAAAGAGGUUAAAACAUUACAAUUCAUUGUUAAGUUGAAU |
| | | ACAGCAACAUGUUCGUGUUCCUGGUGCUGCUCCCCCUGGUGAGCUCCCAGUGCGUCAACCUGACCACACGGACC |
| | | CAGCUGCCCCCCGCCUAUACCAACAGCUUCACCCGCGGCGUCUACUACCCCGACAAGGUGUUCCGGAGCAGCGU |
| | | GCUGCACAGCACCCAGGACCUCUUCCUCCCCUUUUUUAGCAACGUGACCUGGUUCCACGCCAUCCACGUGAGUG |
| | | GCACCAACGGCACCAAGCGGUUCGACAACCCUGUGCUCCCCUUCAACGACGGCGUGUACUUCGCUAGCACAGAAA |
| | | AAAGUAACAUCAUUCGGGGCUGGAUCUUCGGCACCACACUGGAUAGCAAAACCCAGAGCCUGCUGAUUGUGAAUA |
| | | ACGCCACCAACGUGGUGAUCAAGGUGUGCGAGUUCCAGUUCUGCAACGACCCCUUCCUGGGCGUGUACUACCAC |
| | | AAGAACAACAAGAGCUGGAUGGAGAGCGAGUUCCGCGUGUAUAGCUCUGCCAACAACUGCACCUUCGAGUACGUG |
| | | AGCCAGCCCUUCCUGAUGGACCUGGAGGGCAAGCAGGGCAAUUUCAAAAACCUGCGGGAGUUCGUGUUCAAGAA |
| | | CAUCGACGGCUACUUCAAGAUCUACAGCAAGCACACCCCCAUCAACCUGGUGCGGGACCUGCCCCAGGGCUUUAG |
| | | CGCUCUGGAGCCCCUGGUGGACCUGCCCAUCGGCAUCAACAUCACCCGCUUCCAAACCCUGUUGGCCCUGCACC |
| | | GGAGCUACCUGACCCCUGGCGAUAGCAGUAGUGGCUGGACAGCCGGAGCCGCCGCCUACUACGUGGGAUACCUG |
| | | CAGCCCCGGACCUUCCUGCUGAAGUACAACGAGAACGGCACAAUCACAGACGCCGUGGACUGCGCCCUGGACCCC |
| | | CUGAGCGAAACAAAGUGCACCCUCAAAAGUUUCACCGUGGAGAAGGGCAUCUACCAGACCAGCAACUUCCGGGUG |
| | | CAGCCCACCGAGAGCAUCGUGCGGUUCCCCAACAUCACCAACCUGUGCCCCUUCGGCGAGGUGUUCAACGCCAC |
| | | CCGGUUCGCCAGCGUGUACGCCUGGAACCGGAAGCGGAUCAGCAACUGCGUGGCCGACUACAGCGUGCUGUAUA |
| | | ACAGUGCCAGCUUCAGCACCUUCAAGUGCUACGGCGUGAGCCCCACCAAGCUGAACGACCUGUGCUUCACCAACG |
| | | UGUACGCCGACAGCUUCGUGAUCCGGGGCGACGAGGUGCGGCAGAUCGCCCCCGGCCAGACCGGCAAGAUCGCC |
| | | GAUUACAAUUACAAGCUGCCCGACGAUUUCACCGGCUGCGUGAUCGCCUGGAACAGCAACAACCUGGACAGCAAG |
| | | GUGGGCGGCAACUACAACUACCUGUACCGGCUGUUCCGCAAAAGUAACCUGAAGCCCUUCGAGCGGGACAUCAGC |
| | | ACCGAGAUCUACCAGGCCGGCAGUACCCCUUGCAACGGCGUCGAGGGCUUCAACUGCUACUUCCCCCUGCAGAG |
| | | CUACGGCUUCCAGCCCACCAACGGCGUGGGCUACCAGCCCUACCGGGUGGUGGUUCUGAGCUUCGAGCUGCUGC |
| | | ACGCCCCUGCCACCGUGUGCGGCCCCAAGAAAAGCACCAACCUGGUGAAGAACAAGUGCGUGAAUUUCAAUUUUA |
| | | ACGGACUCACCGGAACCGGCGUGCUGACCGAGAGCAACAAGAAGUUCCUGCCCUUCCAGCAAUUCGGCCGGGAU |
| | | AUUGCCGACACCACUGACGCCGUGCGGGACCCCCAGACCCUGGAGAUCCUGGACAUCACACCCUGUAGCUUCGG |
| | | CGGGGUGAGCGUGAUCACCCCCGGCACCAACACCAGCAACCAGGUGGCCGUGCUGUACCAGGACGUGAACUGCA |
| | | CCGAGGUGCCCGUGGCCAUCCACGCCGACCAGCUGACCCCCACCUGGGGGGUGUACAGCACCGGCAGCAACGUG |
| | | UUCCAGACCCGGGCCGGCUGCCUGAUCGGCGCCGAGCACGUGAAUAACAGCUACGAGUGCGACAUCCCCAUCGG |
| | | AGCCGGAAUCUGCGCCAGCUACCAGACCCAGACCAACAGCCCCCGGAGAGCCCGGAGCGUGGCCAGCCAGAGCA |
| | | UUAUUGCCUACACCAUGAGCCUGGGCGCCGAGAACAGCGUGGCCUACAGCAACAAUAGUAUUGCCAUCCCCACCA |
| | | ACUUCACCAUCAGCGUGACCACCGAAAUCCUCCCCGUGAGCAUGACCAAGACCAGCGUGGACUGCACCAUGUACA |
| | | UCUGCGGCGACAGCACCGAGUGCAGCAACCUGCUCCUGCAGUACGGCAGCUUCUGCACCCAGCUGAACCGGGCC |
| | | CUGACCGGAAUUGCCGUGGAGCAGGACAAGAACACCCAGGAGGUGUUCGCCCAGGUGAAGCAGAUCUACAAGACA |
| | | CCUCCCAUCAAGGACUUCGGCGGCUUCAACUUCAGCCAGAUCCUGCCCGACCCCAGCAAGCCCAGCAAGCGGAGC |
| | | UUCAUCGAGGACCUGUUGUUCAACAAGGUGACCCUGGCCGACGCCGGCUUCAUCAAGCAGUACGGCGACUGUCU |
| | | GGGAGAUAUUGCCGCACGGGACCUGAUCUGCGCCCAGAAGUUCAACGGCCUGACCGUGCUGCCCCCACUGCUGA |
| | | CCGACGAGAUGAUCGCCCAGUACACAAGCGCUCUGCUCGCCGGCACCAUCACCAGCGGCUGGACCUUCGGCGCC |
| | | GGCGCUGCCCUGCAGAUCCCCUUCGCCAUGCAGAUGGCCUACCGGUUCAACGGCAUCGGCGUGACCCAGAACGU |
| | | GCUGUACGAGAACCAGAAGCUGAUCGCCAACCAGUUCAACAGCGCCAUCGGCAAGAUCCAGGACAGCCUGAGCUC |
| | | CACCGCCAGCGCCCUGGGCAAGCUGCAGGACGUGGUGAACCAGAACGCCCAGGCCCUGAACACCCUGGUGAAGC |
| | | AGCUGAGCAGCAACUUCGGCGCCAUCAGCUCUGUGCUGAACGACAUCCUGAGCCGGCUGGAUCCUCCUGAGGCC |
| | | GAGGUGCAAAUCGAUCGGCUCAUCACCGGCCGGCUGCAGAGCCUGCAGACCUACGUGACACAGCAGCUGAUCCG |
| | | GGCCGCCGAGAUCCGGGCCAGCGCCAACCUGGCCGCUACCAAGAUGAGCGAGUGCGUGCUGGGCCAGAGCAAGC |
| | | GGGUGGACUUCUGCGGCAAGGGCUACCACCUGAUGAGCUUCCCCCAGAGCGCCCCCCACGGCGUGGUGUUCCUG |
| | | CACGUGACCUACGUGCCCGCCCAGGAGAAGAACUUCACCACCGCCCCCGCCAUCUGCCACGACGGCAAGGCCCAC |
| | | UUCCCCCGGGAGGGCGUGUUCGUGAGCAACGGCACCCACUGGUUCGUGACCCAGCGGAACUUCUACGAGCCCCA |
| | | GAUCAUAACCACAGACAACACCUUCGUGAGCGGCAACUGCGACGUGGUCAUCGGCAUCGUGAACAACACCGUGUA |
| | | CGACCCCCUGCAGCCCGAGCUGGACAGCUUCAAGGAGGAACUGGACAAGUACUUCAAGAACCACACCAGCCCCGA |
| | | CGUGGACCUGGGCGACAUCAGCGGCAUCAACGCCAGCGUGGUGAACAUCCAGAAGGAGAUCGACCGGCUGAACG |
| | | AGGUGGCCAAGAACCUGAACGAGAGCCUGAUCGACCUGCAGGAGCUGGGCAAGUACGAGCAGUACAUCAAGUGG |
| | | CCCUGGUACAUCUGGCUGGGCUUUAUUGCCGGCCUGAUCGCCAUCGUGAUGGUGACCAUCAUGCUGUGCUGUAU |
| | | GACAAGCUGUUGCAGUUGCCUGAAGGGCUGCUGCAGCUGCGGCAGCUGCUGCAAGUUCGACGAGGACGACAGCG |
| | | AGCCCGUGCUGAAGGGCGUGAAGCUGCACUACACCUAAAUGAGACCAUA |
| 153 | 2A0681 | AUAGGUCUCACACACUAGGGCGCGCCAGUCCUCAAGCUGGGCCUGACACAACUGUGUUCACUAGCAACUACUCCC |
| | | AGACACCAUGGUACUCCCGACUCCUGAGGUACUCCCUGCCGUUACUGCCCUGUGGGGCAAGGUGAUACUCCCUG |
| | | AAGUUGGUGGUGAGGCCCUGGGCAGGCUACUCCCGGUCUACCCUUGGACCCAGAGGUCGACUCGGACCGGCCAC |
| | | CAUGUUUGUUUUCUUAGUUUUAUUACCUUUAGUUUCUUCCCAGUGUGUUAAUUUAACUACUAGAACUCAAUUACC |
| | | UCCUGCUUAUACUAAUUCUUUUACUAGAGGAGUGUAUUAUCCUGAUAAGGUUUUUAGAUCUUCUGUUCUGCACUC |
| | | UACUCAGGAUUUGUUCUUGCCCUUCUUCUCUAACGUGACCUGGUUCCACGCUAUUCACGUUUCUGGAACCAACGG |
| | | CACUAAGAGAUUUGAUAAUCCCGUUUUGCCUUUUAACGACGGAGUUUAUUUCGCCUCUACCGAAAAAUCUAACAU |
| | | CAUUAGGGGCUGGAUCUUUGGAACUACCCUGGAUUCUAAAACUCAAUCUUUAUUGAUUGUGAAUAACGCUACCAA |
| | | CGUUGUGAUUAAAGUUUGUGAAUUUCAAUUUUGUAACGAUCCUUUUCUGGGAGUUUAUUAUCAUAAAAACAAUAAA |
| | | UCUUGGAUGGAAUCUGAAUUCCGCGUUUAUUCUUCUGCCAAUAACUGUACCUUUGAGUACGUUUCUCAACCUUUC |
| | | UUAAUGGAUUUAGAAGGAAAACAAGGCAAUUUCAAAAACUUAAGAGAAUUUGUUUUUAAAAAUAUUGACGGAUAUU |
| | | UUAAAAUUUAUUCUAAGCAUACUCCUAUUAAUUUAGUGAGAGACUUACCCCAAGGAUUUUCUGCUUUAGAACCUUU |
| | | AGUUGACUUACCUAUUGGAAUCAAUAUCACUAGAUUUCAAACUUUAUUAGCUUUACAUAGAUCUUAUUUAACUCCU |
| | | GGAGAUUCUUCCUCCGGCUGGACAGCCGGAGCCGCUGCUUAUUACGUUGGAUAUUUACAGCCUAGAACUUUUCU |
| | | GCUGAAAUAUAACGAAAACGGAACCAUUACCGACGCCGUUGACUGUGCUCUGGAUCCUUUAUCUGAAACCAAGUG |
| | | UACUUUAAAAUCUUUUACCGUUGAAAAAGGAAUUUAUCAAACUUCUAAUUUUAGAGUUCAACCUACUGAAUCUAUC |
| | | GUUAGAUUCCCUAAUAUUACUAAUUUGUGUCCCUUUGGAGAGGUUUUCAACGCUACUAGAUUUGCCUCUGUUUAC |
| | | GCUUGGAAUCGCAAGAGAAUUUCUAAUUGUGUGGCCGAUUACUCCGUUUUGUAUAACUCUGCUUCUUUCUCUACU |
| | | UUUAAGUGUUACGGAGUUUCCCCUACUAAACUGAACGAUUUGUGUUUUACUAACGUUUACGCUGAUUCUUUUGUU |
| | | AUUAGAGGCGACGAAGUUAGACAAAUUGCUCCUGGACAAACUGGAAAGAUUGCUGACUAUAACUAUAAACUGCCU |
| | | GACGAUUUUACCGGCUGUGUUAUUGCUUGGAAUUCUAAUAAUUUAGAUUCUAAAGUUGGAGGAAAUUAUAAUUAU |
| | | UUAUAUAGAUUAUUUAGAAAAUCUAAUUUAAAACCUUUUGAAAGAGAUAUUUCCACUGAGAUUUACCAGGCUGGAU |
| | | CUACUCCUUGUAACGGCGUUGAGGGAUUUAAUUGUUAUUUUCCUUUACAAUCUUACGGAUUUCAACCUACCAACG |
| | | GAGUUGGAUAUCAACCUUACAGAGUUGUGGUGCUGUCUUUUGAAUUAUUACACGCUCCCGCUACUGUUUGCGGC |
| | | CCUAAAAAGUCUACUAAUCUGGUUAAGAAUAAGUGUGUGAAUUUUAAUUUCAACGGAUUGACCGGAACUGGAGUU |
| | | CUGACUGAAUCUAAUAAAAAAUUUUUACCCUUUCAACAAUUUGGAAGGGAUAUCGCUGAUACUACUGACGCUGUUA |
| | | GAGAUCCUCAAACUUUAGAAAUCCUGGAUAUUACUCCUUGUUCUUUUGGAGGAGUUUCCGUUAUUACUCCUGGCA |
| | | CUAAUACUUCUAAUCAAGUUGCUGUUUUAUAUCAAGACGUUAAUUGCACCGAAGUUCCUGUUGCUAUUCACGCUG |
| | | AUCAGUUAACUCCUACUUGGAGAGUUUAUUCUACUGGAUCUAACGUUUUUCAAACCAGAGCUGGCUGUUUAAUCG |
| | | GAGCUGAACACGUGAAUAAUUCUUACGAGUGCGAUAUUCCCAUCGGAGCUGGAAUUUGUGCCUCUUAUCAAACUC |
| | | AAACCAAUUCUCCUAGGAGGGCUAGAUCCGUUGCCUCUCAAUCUAUUAUUGCUUAUACCAUGUCUUUAGGAGCUG |
| | | AAAAUUCCGUUGCUUACUCUAACAAUUCUAUUGCUAUUCCUACUAACUUUACUAUUUCUGUUACUACUGAAAUUCU |
| | | GCCCGUGUCCAUGACUAAAACUUCUGUUGAUUGUACUAUGUAUAUUUGUGGAGAUUCCACUGAGUGUUCUAACCU |
| | | GUUAUUACAAUACGGAUCUUUUUGUACUCAAUUAAAUAGAGCUCUGACUGGAAUUGCUGUUGAACAGGACAAAAAU |
| | | ACUCAAGAAGUUUUUGCCCAAGUUAAACAGAUUUAUAAAACUCCUCCUAUUAAAGAUUUUGGAGGAUUUAAUUUCU |
| | | CUCAAAUUUUACCUGACCCUUCUAAGCCUUCCAAAAGGUCUUUCAUCGAAGAUUUAUUAUUUAAUAAAGUUACCUU |
| | | AGCCGACGCUGGAUUUAUUAAGCAAUACGGAGAUUGCUUAGGCGAUAUCGCUGCUAGAGACUUAAUUUGUGCUCA |
| | | AAAAUUUAACGGAUUAACUGUUUUACCUCCCCUGUUAACUGACGAAAUGAUCGCUCAAUAUACUUCUGCUCUGUUA |
| | | GCUGGAACUAUUACUUCUGGCUGGACUUUUGGAGCUGGAGCUGCUUUACAAAUUCCCUUUGCUAUGCAGAUGGC |
| | | UUAUAGAUUUAACGGAAUUGGAGUUACUCAAAACGUUUUAUACGAAAAUCAAAAAUUAAUUGCUAAUCAAUUUAAU |
| | | UCUGCUAUUGGAAAAAUUCAAGAUUCCCUGUCUUCUACUGCUUCCGCUCUGGGAAAAUUACAAGACGUUGUUAAU |
| | | CAAAACGCUCAAGCUUUGAAUACCUUAGUUAAACAAUUAUCUUCCAAUUUUGGAGCUAUUUCUUCUGUUUUAAACG |
| | | ACAUUUUAUCUAGAUUAGAUCCCCCUGAAGCUGAAGUUCAGAUUGACAGAUUGAUUACCGGAAGAUUACAAUCUU |
| | | UACAAACUUACGUUACUCAACAACUGAUUAGAGCUGCUGAAAUUAGAGCCUCUGCUAAUUUAGCUGCUACUAAGAU |
| | | GUCUGAGUGUGUUUUAGGACAGUCCAAAAGAGUUGAUUUUUGUGGAAAAGGCUAUCAUCUGAUGUCUUUUCCUCA |
| | | AUCUGCUCCUCACGGAGUUGUGUUUUUACACGUUACUUACGUUCCUGCUCAAGAGAAGAAUUUUACUACUGCUCC |
| | | UGCUAUUUGUCACGACGGAAAAGCUCAUUUUCCUAGAGAAGGAGUUUUUGUUUCUAACGGAACUCAUUGGUUUGU |
| | | UACUCAAAGAAACUUUUACGAACCUCAGAUUAUUACCACUGAUAAUACCUUUGUUUCUGGCAAUUGUGACGUGGU |
| | | UAUUGGAAUUGUUAAUAAUACUGUUUACGAUCCUUUACAACCCGAACUGGAUUCUUUUAAAGAAGAAUUAGAUAAA |
| | | UACUUUAAAAAUCAUACUUCUCCCGACGUUGAUUUAGGAGAUAUCUCUGGAAUUAACGCUUCUGUUGUGAAUAUU |
| | | CAAAAGGAAAUUGAUAGAUUAAACGAAGUGGCUAAAAAUUUAAACGAGUCUUUAAUUGAUUUACAGGAACUGGGAA |
| | | AAUACGAACAAUAUAUUAAGUGGCCUUGGUACAUUUGGUUAGGCUUUAUUGCUGGACUGAUUGCUAUUGUGAUGG |
| | | UUACUAUCAUGUUGUGUUGCAUGACUUCUUGUUGUUCCUGUUUAAAAGGCUGUUGCUCUUGUGGAUCUUGUUGC |
| | | AAAUUUGACGAAGACGAUUCUGAACCUGUUCUGAAAGGAGUUAAACUGCAUUAUACUUAAAUGAGACCAUA |
| 154 | 2A1681 | AUAGGUCUCACACACUAGGGCGCGCCAGUCCUCAAGCUGGGCCUGACACAACUGUGUUCACUAGCAACUACUCCC |
| | | AGACACCAUGGUACUCCCGACUCCUGAGGUACUCCCUGCCGUUACUGCCCUGUGGGGCAAGGUGAUACUCCCUG |
| | | AAGUUGGUGGUGAGGCCCUGGGCAGGCUACUCCCGGUCUACCCUUGGACCCAGAGGUCGACUCGGACCGGCCAC |
| | | CAUGUUCGUGUUCUUAGUGCUGUUACCCCUGGUUUCUUCUCAGUGUGUCAAUUUAACCACCAGAACCCAACUGCC |
| | | UCCUGCCUAUACUAAUUCCUUUACCCGCGGAGUUUACUAUCCCGAUAAGGUUUUUCGCUCCUCUGUUUUACACUC |
| | | UACUCAGGACUUAUUCUUACCCUUCUUCUCCAACGUUACUUGGUUUCACGCCAUUCACGUUUCUGGAACCAACGG |
| | | AACUAAGAGAUUCGAUAAUCCUGUGUUACCUUUCAACGACGGAGUUUAUUUUGCUUCCACUGAAAAAUCCAAUAUC |
| | | AUUAGGGGCUGGAUCUUUGGAACCACUUUAGAUUCCAAGACUCAAUCUUUAUUAAUUGUGAAUAACGCCACCAAC |
| | | GUGGUUAUCAAAGUGUGUGAAUUCCAAUUUUGUAACGACCCUUUCUUAGGCGUGUAUUAUCACAAAAAUAAUAAAU |
| | | CUUGGAUGGAAUCUGAAUUUCGCGUUUACUCUUCCGCUAACAACUGCACUUUUGAGUACGUUUCCCAGCCUUUUC |
| | | UGAUGGAUCUGGAAGGCAAACAGGGAAAUUUUAAAAAUCUGAGAGAAUUUGUUUUUAAGAACAUUGACGGAUAUU |
| | | UCAAGAUCUAUUCUAAACACACUCCCAUCAAUUUGGUUAGAGAUUUACCUCAGGGCUUUUCUGCUUUAGAACCUU |
| | | UAGUUGACCUGCCUAUUGGAAUCAACAUUACUAGAUUUCAAACUCUGUUAGCUCUGCAUAGAUCUUAUUUAACUC |
| | | CUGGAGAUUCCUCCUCCGGCUGGACCGCCGGAGCUGCUGCUUAUUACGUUGGCUAUUUACAACCCAGAACUUUU |
| | | CUGUUAAAAUAUAACGAAAACGGCACCAUCACUGACGCCGUGGAUUGUGCUUUAGAUCCCUUAUCCGAAACUAAG |
| | | UGUACUCUGAAAUCCUUCACUGUUGAAAAAGGAAUUUAUCAGACCUCUAAUUUUAGAGUGCAACCUACCGAAUCUA |
| | | UUGUUAGAUUUCCUAAUAUUACCAACUUGUGCCCUUUUGGCGAAGUUUUCAACGCUACUAGAUUUGCUUCUGUUU |
| | | ACGCUUGGAAUAGAAAAAGAAUUUCUAACUGUGUGGCUGACUAUUCCGUGUUAUACAAUUCUGCCUCUUUUUCUA |
| | | CUUUUAAGUGUUACGGAGUGUCUCCCACUAAACUGAACGAUUUGUGCUUUACCAACGUUUACGCUGAUUCUUUUG |
| | | UUAUUAGAGGCGACGAGGUUCGCCAGAUUGCCCCUGGCCAGACUGGCAAAAUUGCUGACUAUAACUAUAAAUUAC |
| | | CUGACGAUUUUACCGGCUGCGUUAUCGCUUGGAACUCUAAUAAUCUGGAUUCUAAAGUUGGAGGAAACUACAAUU |
| | | AUUUAUAUAGAUUAUUUAGAAAAUCUAAUUUAAAACCCUUCGAGAGGGAUAUCUCUACUGAAAUCUACCAAGCUGG |
| | | AUCUACUCCUUGCAACGGCGUUGAAGGAUUUAAUUGUUAUUUUCCUUUACAAUCUUACGGAUUCCAACCUACUAA |
| | | CGGAGUUGGAUAUCAGCCUUAUAGAGUGGUGGUUUUAUCUUUCGAAUUAUUACACGCUCCCGCUACUGUGUGUG |
| | | GACCCAAAAAGUCUACUAAUUUAGUUAAAAAUAAGUGUGUUAAUUUCAAUUUUAACGGACUCACUGGCACUGGAGU |
| | | GUUAACUGAAUCUAAUAAAAAGUUCUUACCUUUCCAACAGUUCGGACGCGACAUUGCCGACACCACUGACGCUGU |
| | | GAGAGAUCCUCAAACCUUAGAGAUUCUGGAUAUUACCCCUUGUUCCUUUGGAGGCGUUUCCGUUAUCACUCCCGG |
| | | AACUAACACUUCUAAUCAGGUUGCCGUUUUAUAUCAGGACGUUAAUUGCACUGAAGUUCCUGUUGCUAUUCACGC |
| | | UGAUCAACUGACUCCUACUUGGAGAGUUUAUUCCACUGGAUCUAACGUUUUUCAGACUCGCGCCGGCUGUUUAAU |
| | | UGGAGCUGAACACGUGAACAACUCCUACGAGUGCGAUAUUCCUAUUGGCGCUGGCAUCUGUGCUUCUUAUCAAAC |
| | | UCAAACUAAUUCUCCCAGGAGGGCUCGCUCUGUUGCUUCCCAAUCUAUCAUUGCUUAUACUAUGUCCUUAGGCGC |
| | | UGAAAAUUCUGUUGCUUAUUCCAACAAUUCUAUUGCUAUUCCCACCAAUUUUACUAUUUCUGUGACUACUGAAAUU |
| | | UUACCUGUUUCCAUGACUAAGACUUCUGUUGAUUGUACUAUGUAUAUCUGCGGAGAUUCUACUGAGUGUUCCAAC |
| | | CUCUUAUUACAGUACGGAUCUUUUUGCACUCAGUUAAAUAGAGCUCUGACUGGAAUCGCUGUUGAACAAGACAAA |
| | | AACACCCAAGAAGUGUUUGCUCAGGUGAAGCAAAUUUACAAGACACCUCCUAUUAAGGAUUUUGGAGGAUUCAAU |
| | | UUUUCCCAGAUUUUACCUGAUCCUUCUAAACCUUCUAAACGCUCCUUUAUUGAAGAUUUACUGUUCAAUAAAGUGA |
| | | CUCUGGCUGACGCUGGCUUCAUCAAGCAAUACGGCGAUUGUUUAGGAGACAUCGCUGCUAGAGACUUAAUUUGU |
| | | GCUCAAAAAUUCAACGGACUGACUGUUCUGCCCCCUUUACUGACCGACGAGAUGAUCGCCCAAUAUACUUCUGCC |
| | | CUGUUAGCUGGCACCAUUACUUCUGGCUGGACCUUUGGAGCUGGCGCUGCUUUACAAAUUCCUUUCGCCAUGCA |
| | | GAUGGCUUAUCGCUUUAACGGAAUUGGCGUUACCCAAAACGUGUUAUACGAGAAUCAAAAAUUAAUCGCCAAUCAA |
| | | UUUAAUUCUGCUAUUGGCAAGAUUCAAGAUUCUUUAUCUUCUACUGCUUCCGCCCUGGGCAAACUGCAGGACGUU |
| | | GUUAACCAGAACGCUCAAGCCCUGAACACUUUAGUGAAGCAACUGUCUUCUAACUUCGGCGCUAUUUCUUCCGUU |
| | | UUAAACGACAUUCUGUCUCGCUUAGAUCCCCCUGAGGCUGAGGUUCAAAUUGAUAGACUGAUUACUGGAAGAUUA |
| | | CAGUCCCUGCAAACUUACGUUACUCAACAGUUAAUCAGAGCUGCUGAAAUCCGCGCUUCCGCUAAUUUAGCUGCU |
| | | ACUAAAAUGUCUGAGUGUGUGUUAGGCCAGUCUAAGAGAGUUGACUUUUGUGGCAAGGGCUAUCAUUUAAUGUCU |
| | | UUUCCUCAGUCCGCUCCUCACGGCGUUGUGUUCUUACACGUGACUUACGUUCCCGCCCAAGAGAAAAAUUUUACC |
| | | ACUGCUCCUGCUAUUUGUCACGACGGAAAAGCUCAUUUUCCUAGAGAAGGAGUGUUUGUUUCUAACGGAACCCAC |
| | | UGGUUUGUGACUCAAAGAAACUUUUACGAACCCCAAAUUAUUACUACUGACAAUACUUUCGUUUCCGGCAACUGU |
| | | GACGUGGUGAUCGGAAUUGUUAAUAACACCGUUUACGAUCCCUUACAACCUGAAUUAGAUUCUUUUAAAGAAGAA |
| | | UUAGAUAAAUAUUUCAAAAAUCAUACUUCCCCUGACGUUGAUCUGGGAGAUAUUUCUGGAAUUAACGCUUCUGUG |
| | | GUGAACAUUCAAAAAGAGAUUGACAGAUUAAACGAAGUUGCUAAAAACCUGAACGAGUCCCUGAUCGACCUGCAGG |
| | | AACUGGGAAAAUACGAGCAGUAUAUUAAGUGGCCUUGGUAUAUUUGGUUAGGAUUUAUUGCUGGAUUAAUUGCUA |
| | | UUGUGAUGGUGACCAUUAUGUUGUGCUGUAUGACCUCUUGUUGUUCUUGCCUGAAGGGCUGCUGUUCUUGUGGC |
| | | UCUUGUUGCAAGUUUGACGAAGACGAUUCCGAACCCGUUUUAAAGGGAGUGAAACUGCAUUAUACUUAAAUGAGA |
| | | CCAUA |
| 155 | 2A2681 | AUAGGUCUCACACACUAGGGCGCGCCAGUCCUCAAGCUGGGCCUGACACAACUGUGUUCACUAGCAACUACUCCC |
| | | AGACACCAUGGUACUCCCGACUCCUGAGGUACUCCCUGCCGUUACUGCCCUGUGGGGCAAGGUGAUACUCCCUG |
| | | AAGUUGGUGGUGAGGCCCUGGGCAGGCUACUCCCGGUCUACCCUUGGACCCAGAGGUCGACUCGGACCGGCCAC |
| | | CAUGUUUGUUUUUCUGGUUUUAUUACCCUUAGUGUCCUCCCAGUGCGUGAACUUAACUACCCGCACUCAGCUGCC |
| | | UCCUGCCUAUACCAACUCUUUCACUAGAGGCGUUUACUAUCCUGACAAAGUUUUUAGAUCUUCUGUGCUGCAUUC |
| | | CACUCAAGAUUUAUUCCUGCCCUUCUUUUCUAACGUUACUUGGUUUCACGCCAUCCACGUGUCUGGCACCAACGG |
| | | AACCAAACGCUUUGACAACCCUGUGUUACCUUUUAACGACGGAGUUUACUUCGCCUCCACUGAAAAGUCCAAUAU |
| | | UAUCCGGGGCUGGAUUUUCGGAACCACCUUAGAUUCUAAAACCCAGUCUCUGCUGAUUGUGAACAACGCCACUAA |
| | | CGUGGUUAUUAAAGUGUGCGAGUUUCAAUUUUGCAACGACCCUUUUCUGGGAGUUUAUUACCACAAAAAUAACAA |
| | | AUCUUGGAUGGAGUCUGAAUUUAGAGUGUAUUCUUCCGCCAAUAAUUGCACCUUCGAGUACGUUUCCCAACCCUU |
| | | UCUGAUGGACUUAGAAGGAAAGCAAGGCAAUUUCAAAAACCUGCGCGAAUUUGUGUUCAAAAAUAUUGACGGCUA |
| | | UUUCAAAAUUUACUCCAAGCAUACCCCUAUUAAUUUAGUGCGCGAUCUGCCUCAGGGCUUCUCUGCCUUAGAGCC |
| | | UUUAGUGGACCUGCCUAUUGGCAUUAAUAUUACUCGCUUUCAGACUUUACUGGCCCUGCAUAGAUCUUAUUUAAC |
| | | UCCUGGAGACUCUUCUUCCGGCUGGACCGCUGGAGCCGCUGCCUACUACGUUGGCUAUCUGCAGCCUAGAACUU |
| | | UUUUAUUAAAGUACAACGAAAACGGAACCAUCACUGACGCUGUUGAUUGCGCCCUGGAUCCUUUAUCUGAAACAAA |
| | | GUGCACCCUGAAGUCCUUCACCGUUGAAAAGGGCAUUUACCAAACAUCCAAUUUUAGGGUUCAGCCUACUGAAUC |
| | | CAUCGUGCGCUUUCCCAACAUCACUAACUUGUGUCCCUUUGGCGAGGUGUUUAACGCCACUCGCUUUGCCUCUG |
| | | UGUACGCCUGGAACAGAAAGAGAAUUUCCAAUUGCGUGGCUGAUUAUUCUGUGCUGUAUAACUCCGCUUCUUUCU |
| | | CCACCUUUAAGUGUUACGGAGUGUCCCCUACUAAACUGAACGACUUGUGCUUCACCAACGUUUACGCCGAUUCUU |
| | | UUGUGAUUCGCGGCGACGAAGUUAGACAAAUCGCCCCCGGACAGACCGGAAAGAUCGCUGAUUACAACUAUAAGU |
| | | UACCUGACGACUUCACCGGCUGCGUGAUUGCUUGGAAUUCUAAUAACUUAGACUCUAAAGUUGGAGGCAACUACA |
| | | AUUACCUGUAUAGAUUAUUCCGCAAAUCUAACCUGAAACCUUUUGAGAGAGACAUCUCCACCGAAAUUUACCAAGC |
| | | CGGCUCUACCCCCUGCAACGGAGUUGAAGGAUUUAAUUGCUACUUUCCCCUGCAGUCCUACGGAUUCCAACCUAC |
| | | UAACGGCGUUGGAUACCAACCUUACAGAGUUGUGGUGCUGUCUUUUGAAUUAUUACACGCCCCUGCCACCGUUU |
| | | GUGGCCCUAAGAAAUCUACCAAUCUGGUUAAAAACAAGUGUGUGAAUUUUAAUUUUAACGGCCUGACCGGCACUG |
| | | GCGUUUUAACCGAGUCUAACAAGAAGUUUCUGCCUUUCCAACAAUUUGGCAGAGACAUCGCCGACACCACCGACG |
| | | CUGUGCGCGAUCCUCAAACCUUAGAAAUUUUAGAUAUUACUCCUUGCUCUUUCGGCGGCGUUUCCGUUAUUACUC |
| | | CUGGAACCAAUACCUCUAAUCAAGUGGCUGUGCUGUACCAGGACGUUAAUUGCACUGAAGUGCCUGUGGCUAUUC |
| | | ACGCCGAUCAACUGACCCCCACUUGGAGAGUUUAUUCUACUGGAUCUAACGUGUUCCAAACUAGAGCUGGCUGUC |
| | | UGAUCGGCGCCGAGCACGUUAAUAAUUCUUACGAGUGUGAUAUCCCUAUUGGCGCUGGCAUUUGCGCCUCUUAC |
| | | CAGACCCAGACCAACUCCCCCCGCAGAGCUAGAUCCGUGGCCUCUCAGUCCAUUAUUGCCUAUACUAUGUCCUUA |
| | | GGAGCCGAAAAUUCUGUGGCUUACUCCAACAAUUCUAUUGCCAUUCCCACUAAUUUUACUAUCUCUGUGACUACC |
| | | GAAAUCCUGCCCGUGUCCAUGACUAAGACCUCCGUGGACUGCACCAUGUAUAUCUGCGGAGACUCUACUGAGUGU |
| | | UCCAACUUAUUACUGCAGUACGGCUCUUUCUGUACUCAGCUGAAUAGAGCCCUGACUGGAAUUGCUGUGGAGCAA |
| | | GACAAAAAUACCCAGGAGGUGUUCGCUCAGGUGAAACAAAUUUAUAAGACCCCUCCCAUCAAAGAUUUUGGAGGC |
| | | UUCAAUUUUUCUCAAAUUCUGCCCGACCCCUCCAAGCCUUCCAAAAGAUCCUUUAUUGAAGAUCUGCUGUUCAAUA |
| | | AGGUUACUUUAGCCGACGCCGGCUUCAUUAAGCAGUACGGAGAUUGUCUGGGCGAUAUUGCUGCCCGCGACCUG |
| | | AUUUGCGCUCAGAAGUUCAACGGAUUAACCGUUCUGCCUCCUCUGCUGACUGACGAGAUGAUUGCUCAGUAUACU |
| | | UCUGCCCUGCUGGCUGGAACUAUUACCUCUGGCUGGACCUUCGGCGCCGGAGCUGCUCUGCAAAUUCCCUUCGC |
| | | CAUGCAAAUGGCUUACAGAUUUAACGGCAUCGGAGUUACUCAAAACGUGCUGUACGAAAACCAAAAAUUAAUUGCC |
| | | AACCAGUUCAAUUCCGCUAUCGGCAAAAUUCAGGAUUCUCUGUCUUCUACUGCUUCCGCUUUAGGCAAACUGCAA |
| | | GACGUUGUUAACCAGAACGCCCAAGCUUUAAACACCCUGGUUAAGCAGCUGUCCUCUAAUUUUGGCGCUAUCUCU |
| | | UCUGUUCUGAACGACAUUUUAUCUAGACUGGACCCCCCUGAAGCCGAGGUGCAGAUUGAUAGAUUAAUCACCGGA |
| | | AGACUGCAAUCCCUGCAGACCUACGUUACCCAGCAAUUAAUCAGAGCCGCCGAGAUCAGAGCCUCUGCCAACUUA |
| | | GCUGCCACCAAAAUGUCCGAGUGUGUGCUGGGACAGUCCAAGCGCGUGGACUUCUGUGGAAAGGGAUACCACCU |
| | | GAUGUCUUUUCCUCAAUCUGCUCCCCACGGAGUUGUGUUUCUGCACGUUACUUACGUGCCUGCCCAAGAGAAAAA |
| | | CUUUACUACCGCCCCCGCUAUUUGCCACGACGGCAAGGCUCACUUCCCUAGAGAAGGAGUUUUUGUGUCUAACG |
| | | GAACCCAUUGGUUUGUGACUCAAAGAAAUUUUUACGAGCCUCAAAUCAUUACCACCGAUAACACUUUUGUUUCCG |
| | | GCAAUUGUGACGUGGUGAUUGGAAUCGUUAACAACACCGUUUACGACCCUUUACAGCCCGAAUUAGACUCUUUUA |
| | | AAGAGGAGUUAGAUAAAUAUUUUAAAAACCAUACCUCUCCCGACGUGGACCUGGGAGAUAUUUCCGGAAUUAACG |
| | | CUUCUGUUGUGAAUAUCCAGAAAGAGAUCGACAGAUUAAACGAGGUUGCUAAAAAUUUAAACGAAUCCCUGAUUGA |
| | | CCUGCAGGAGCUGGGCAAAUACGAACAAUAUAUUAAGUGGCCUUGGUAUAUUUGGUUAGGCUUCAUCGCUGGAUU |
| | | AAUCGCUAUUGUUAUGGUGACUAUUAUGUUGUGUUGUAUGACUUCCUGCUGUUCUUGCUUAAAAGGCUGCUGUU |
| | | CCUGCGGAUCCUGUUGUAAAUUCGACGAGGACGAUUCCGAGCCUGUUUUAAAAGGAGUGAAAUUACAUUAUACUU |
| | | AAAUGAGACCAUA |
| 156 | 2A3681 | AUAGGUCUCACACACUAGGGCGCGCCAGUCCUCAAGCUGGGCCUGACACAACUGUGUUCACUAGCAACUACUCCC |
| | | AGACACCAUGGUACUCCCGACUCCUGAGGUACUCCCUGCCGUUACUGCCCUGUGGGGCAAGGUGAUACUCCCUG |
| | | AAGUUGGUGGUGAGGCCCUGGGCAGGCUACUCCCGGUCUACCCUUGGACCCAGAGGUCGACUCGGACCGGCCAC |
| | | CAUGUUCGUGUUCCUGGUGCUGCUGCCCUUAGUGUCCUCCCAGUGUGUGAACCUGACCACCAGAACCCAGUUAC |
| | | CUCCCGCUUACACCAACUCCUUUACCCGCGGAGUGUACUACCCUGAUAAGGUUUUUAGAUCCUCCGUUCUGCAUU |
| | | CUACCCAAGACCUGUUUUUACCCUUCUUUUCCAACGUGACCUGGUUCCACGCUAUCCACGUGUCCGGCACUAACG |
| | | GCACUAAGCGCUUCGACAAUCCUGUGCUCCCUUUUAACGACGGCGUGUACUUCGCUUCUACCGAAAAAUCCAACA |
| | | UCAUCCGCGGCUGGAUCUUCGGAACUACCCUGGAUUCUAAAACCCAGUCUUUAUUAAUCGUGAAUAACGCCACCA |
| | | ACGUGGUUAUUAAGGUCUGUGAGUUCCAAUUUUGCAACGACCCUUUCUUAGGCGUUUAUUACCACAAAAACAAUA |
| | | AGUCUUGGAUGGAGUCCGAAUUCCGCGUGUACUCCUCUGCCAACAAUUGCACCUUUGAGUACGUGUCCCAGCCC |
| | | UUCCUGAUGGACCUGGAAGGCAAGCAGGGCAAUUUUAAAAAUCUGCGCGAAUUCGUUUUCAAGAACAUCGACGGC |
| | | UACUUUAAGAUUUAUUCCAAACAUACCCCCAUCAACCUGGUGCGCGAUUUACCCCAGGGCUUCUCCGCCUUAGAG |
| | | CCCUUAGUGGAUCUGCCUAUCGGCAUCAAUAUCACCCGCUUUCAGACUCUGCUGGCCCUGCACAGAUCCUACCUG |
| | | ACUCCCGGAGACUCUUCUUCUGGCUGGACCGCCGGAGCUGCCGCCUACUACGUGGGCUACCUGCAACCCCGCAC |
| | | CUUUCUGCUGAAGUACAACGAAAACGGCACCAUCACAGACGCCGUUGACUGCGCUCUGGACCCCCUGUCUGAGAC |
| | | UAAGUGCACCCUGAAGUCCUUCACUGUGGAGAAAGGAAUCUACCAGACCUCCAACUUCCGCGUGCAGCCUACCGA |
| | | AUCCAUUGUUCGCUUCCCUAACAUUACUAAUCUGUGCCCCUUCGGAGAAGUUUUCAACGCCACUAGAUUCGCUUC |
| | | CGUGUACGCCUGGAAUCGCAAGCGCAUCUCCAAUUGCGUUGCUGACUACUCUGUGUUAUACAAUUCCGCCUCUUU |
| | | UUCCACUUUCAAGUGCUACGGCGUGUCUCCUACCAAGCUGAACGACCUGUGUUUCACUAACGUGUACGCUGAUUC |
| | | CUUUGUUAUCCGCGGCGACGAGGUGAGACAGAUCGCCCCUGGCCAGACCGGAAAAAUCGCCGACUACAACUACAA |
| | | GUUACCCGACGAUUUUACCGGCUGUGUUAUUGCUUGGAACUCUAAUAAUCUGGACUCUAAAGUGGGGGCAAUUA |
| | | CAACUACUUAUAUCGCCUGUUCAGAAAAUCCAACCUGAAACCCUUCGAACGGGACAUUUCCACCGAAAUUUAUCAG |
| | | GCCGGCUCCACCCCCUGCAACGGAGUGGAGGGCUUCAAUUGCUACUUCCCCCUGCAAUCCUACGGCUUUCAGCC |
| | | CACCAACGGCGUGGGAUACCAGCCCUACCGCGUUGUUGUGUUAUCCUUUGAACUGCUGCACGCUCCUGCUACUG |
| | | UGUGCGGACCUAAAAAAUCCACCAAUCUGGUGAAGAACAAGUGUGUGAAUUUUAAUUUUAACGGCCUGACCGGCA |
| | | CCGGAGUGCUGACCGAGUCCAACAAAAAGUUUCUGCCCUUUCAGCAGUUCGGCCGGGACAUUGCCGACACUACC |
| | | GACGCUGUGAGGGAUCCUCAGACCCUGGAGAUUCUGGACAUUACCCCUUGCUCCUUCGGAGGAGUUUCCGUGAU |
| | | CACCCCUGGCACCAAUACUUCUAACCAAGUGGCUGUUUUAUACCAGGACGUGAAUUGUACUGAGGUGCCUGUGGC |
| | | CAUCCACGCCGAUCAAUUAACUCCCACCUGGAGAGUGUAUUCCACCGGCUCUAACGUUUUCCAAACCCGCGCUGG |
| | | CUGCUUAAUCGGCGCUGAGCACGUGAACAACUCCUACGAGUGUGAUAUUCCUAUCGGAGCCGGCAUCUGUGCUU |
| | | CCUACCAGACUCAGACCAACUCCCCCAGACGCGCUAGGUCCGUGGCUUCCCAGUCUAUUAUCGCUUAUACUAUGU |
| | | CCCUGGGAGCCGAGAAUUCUGUUGCCUAUUCCAAUAACUCCAUCGCCAUUCCUACCAACUUUACCAUCUCUGUGA |
| | | CCACCGAGAUUCUGCCCGUGUCCAUGACCAAAACUUCUGUGGAUUGUACCAUGUACAUCUGUGGAGAUUCCACCG |
| | | AGUGCUCUAACCUGCUGCUGCAGUACGGCUCCUUUUGCACCCAAUUAAACCGCGCUCUGACUGGCAUCGCCGUG |
| | | GAGCAAGAUAAAAACACCCAAGAGGUGUUCGCUCAGGUGAAGCAGAUCUACAAGACACCUCCCAUUAAAGAUUUCG |
| | | GAGGCUUUAAUUUCUCUCAGAUCCUGCCCGACCCUUCUAAGCCCUCUAAACGCUCCUUCAUCGAGGAUCUGCUGU |
| | | UCAACAAGGUUACCCUGGCCGACGCUGGCUUUAUCAAACAGUACGGCGACUGCUUAGGCGACAUCGCCGCCCGC |
| | | GAUUUAAUUUGCGCUCAGAAGUUCAACGGACUGACCGUGCUGCCUCCUCUGCUGACCGACGAAAUGAUCGCCCAA |
| | | UACACCUCCGCCCUGCUGGCUGGCACUAUCACCUCCGGCUGGACCUUUGGCGCUGGAGCCGCUCUGCAAAUCCC |
| | | UUUCGCUAUGCAGAUGGCUUACCGCUUUAACGGAAUCGGCGUGACCCAGAACGUGUUAUACGAAAAUCAGAAAUU |
| | | AAUUGCCAAUCAAUUUAACUCUGCCAUCGGCAAGAUUCAGGAUUCUCUGUCUUCUACUGCCUCUGCCUUAGGAAA |
| | | ACUGCAGGACGUGGUGAAUCAGAACGCCCAGGCCCUGAAUACCCUGGUUAAGCAACUGUCUUCCAAUUUCGGCGC |
| | | UAUCUCCUCUGUGUUAAACGACAUUCUGUCCCGCCUGGAUCCUCCUGAGGCCGAAGUGCAAAUUGACCGCUUAAU |
| | | CACUGGCAGACUGCAAUCCCUGCAAACCUACGUUACUCAACAGCUGAUCAGAGCCGCCGAAAUCCGCGCUUCUGC |
| | | CAACUUAGCUGCUACCAAGAUGUCCGAGUGCGUGCUGGGACAGUCCAAAAGAGUUGACUUUUGCGGAAAGGGCU |
| | | ACCACCUGAUGUCCUUUCCCCAGUCCGCCCCCCACGGAGUUGUUUUCCUGCACGUUACUUACGUUCCUGCUCAA |
| | | GAGAAGAACUUCACCACCGCUCCCGCUAUUUGCCACGACGGCAAGGCUCAUUUCCCCAGAGAGGGAGUGUUUGU |
| | | GUCCAACGGCACUCACUGGUUUGUUACUCAGCGCAACUUCUACGAACCUCAGAUCAUCACCACUGACAAUACCUU |
| | | UGUGUCCGGAAACUGUGACGUGGUUAUCGGCAUUGUGAACAAUACUGUGUACGACCCUUUACAACCUGAGCUGG |
| | | AUUCUUUUAAAGAAGAACUGGACAAGUACUUCAAGAACCACACCUCCCCCGACGUGGAUCUGGGCGACAUCUCCG |
| | | GCAUCAACGCCUCUGUGGUGAAUAUUCAGAAGGAGAUUGAUCGCCUGAACGAGGUUGCCAAGAAUCUGAACGAGU |
| | | CUCUGAUCGACCUGCAGGAGCUGGGCAAGUACGAACAGUACAUCAAGUGGCCCUGGUACAUUUGGCUGGGCUUU |
| | | AUUGCUGGACUGAUCGCUAUCGUUAUGGUUACCAUCAUGCUGUGCUGUAUGACCUCUUGCUGCUCCUGUCUGAA |
| | | AGGCUGUUGCUCCUGCGGCUCCUGUUGUAAGUUUGACGAGGACGACUCCGAGCCUGUUCUGAAAGGAGUUAAAC |
| | | UGCACUACACCUAAAUGAGACCAUA |
| 157 | 2A4681 | AUAGGUCUCACACACUAGGGCGCGCCAGUCCUCAAGCUGGGCCUGACACAACUGUGUUCACUAGCAACUACUCCC |
| | | AGACACCAUGGUACUCCCGACUCCUGAGGUACUCCCUGCCGUUACUGCCCUGUGGGGCAAGGUGAUACUCCCUG |
| | | AAGUUGGUGGUGAGGCCCUGGGCAGGCUACUCCCGGUCUACCCUUGGACCCAGAGGUCGACUCGGACCGGCCAC |
| | | CAUGUUUGUGUUUCUGGUGCUGCUGCCUCUGGUGUCCUCUCAGUGUGUUAACCUGACCACCAGAACCCAACUGC |
| | | CCCCCGCCUACACUAACUCUUUCACUCGCGGCGUGUACUACCCCGAUAAAGUUUUCAGAUCCUCCGUGCUCCAUU |
| | | CUACCCAAGACCUGUUCUUACCCUUUUUCUCCAACGUGACCUGGUUCCACGCCAUCCACGUGUCCGGCACUAACG |
| | | GAACCAAGCGCUUCGAUAAUCCCGUGCUGCCUUUCAACGACGGAGUUUACUUUGCUUCCACCGAGAAGUCCAAUA |
| | | UUAUCCGGGGCUGGAUCUUCGGCACCACACUGGAUUCCAAAACCCAGUCCUUACUGAUUGUGAACAACGCCACUA |
| | | ACGUGGUGAUCAAGGUGUGUGAGUUCCAGUUCUGUAACGACCCCUUUCUGGGCGUGUAUUAUCAUAAAAACAACA |
| | | AGUCCUGGAUGGAGUCCGAGUUUAGAGUGUAUUCUUCCGCUAACAACUGCACCUUCGAAUACGUGUCCCAGCCUU |
| | | UCCUGAUGGAUCUGGAAGGAAAGCAGGGCAACUUCAAGAACUUACGCGAGUUCGUGUUCAAGAACAUCGACGGCU |
| | | ACUUCAAAAUUUACUCCAAGCACACCCCUAUCAACUUAGUGAGAGAUCUGCCCCAGGGCUUCUCCGCUCUGGAAC |
| | | CUCUGGUGGACUUACCCAUUGGCAUCAACAUCACUCGCUUCCAAACACUGCUCGCUCUGCACCGCUCUUAUCUGA |
| | | CCCCCGGCGACUCCUCUUCUGGCUGGACCGCCGGCGCCGCUGCCUAUUACGUGGGAUACCUGCAACCCCGCACC |
| | | UUUCUGCUGAAAUACAACGAAAACGGCACCAUCACAGACGCUGUGGACUGCGCUCUGGACCCCCUGUCCGAGACU |
| | | AAGUGCACCCUGAAGUCCUUCACCGUUGAAAAGGGCAUUUAUCAGACUUCCAACUUCCGCGUGCAGCCUACUGAG |
| | | UCCAUUGUGCGCUUCCCUAACAUCACUAACUUGUGUCCUUUCGGCGAAGUGUUCAACGCUACUCGCUUCGCCUCC |
| | | GUGUACGCCUGGAACCGCAAGAGAAUCUCCAAUUGCGUGGCCGACUACUCUGUUCUCUACAACUCUGCCUCCUUC |
| | | UCCACCUUUAAGUGCUACGGCGUGUCCCCCACCAAACUGAACGACCUGUGCUUCACCAACGUGUACGCCGACUCC |
| | | UUUGUGAUCAGAGGCGACGAGGUGCGCCAGAUCGCCCCCGGCCAGACUGGCAAGAUCGCCGAUUACAAUUACAA |
| | | GCUGCCUGACGACUUUACCGGCUGCGUGAUUGCCUGGAACUCCAACAACCUGGACUCCAAAGUGGGGGGCAACU |
| | | ACAACUACCUGUACCGCCUGUUUAGAAAAUCCAACCUGAAGCCCUUCGAGCGGGACAUUUCUACUGAGAUCUACC |
| | | AGGCCGGCUCCACCCCCUGUAACGGCGUGGAAGGCUUCAACUGCUACUUUCCCCUGCAGUCCUACGGCUUCCAG |
| | | CCUACCAACGGCGUGGGCUACCAGCCCUACCGCGUGGUGGUGUUAUCCUUCGAGCUGCUGCACGCCCCUGCCAC |
| | | CGUGUGCGGACCCAAAAAGUCUACUAACCUGGUUAAGAAUAAGUGUGUUAAUUUCAAUUUUAACGGCUUAACCGG |
| | | AACCGGAGUGCUGACCGAGUCCAAUAAAAAGUUCCUGCCCUUUCAGCAGUUUGGCCGCGACAUCGCCGAUACUAC |
| | | CGACGCCGUGCGCGAUCCCCAGACCCUGGAGAUCCUGGACAUUACCCCCUGCUCUUUCGGCGGAGUGUCCGUGA |
| | | UCACCCCCGGCACCAAUACCUCCAAUCAGGUGGCCGUUCUGUACCAGGACGUGAAUUGCACCGAAGUGCCCGUG |
| | | GCCAUUCACGCCGACCAGUUAACUCCUACUUGGAGAGUGUACUCCACCGGCUCUAACGUGUUUCAGACCCGCGCC |
| | | GGCUGUCUGAUCGGCGCCGAGCACGUGAACAACUCCUACGAGUGCGACAUUCCCAUUGGCGCCGGCAUCUGCGC |
| | | CUCCUACCAAACCCAGACUAACUCUCCCAGACGCGCCCGCUCUGUGGCCUCUCAGUCCAUCAUCGCUUACACUAU |
| | | GUCCCUGGGCGCCGAGAACUCCGUGGCCUAUUCCAACAACUCCAUCGCCAUCCCCACUAACUUCACCAUCUCUGU |
| | | GACCACCGAAAUCCUCCCCGUGUCUAUGACUAAGACUUCCGUGGACUGUACCAUGUACAUUUGCGGCGACUCCAC |
| | | CGAGUGUUCCAAUCUGCUGCUGCAGUACGGCUCCUUUUGCACCCAGCUGAACCGCGCCCUGACCGGCAUCGCUG |
| | | UUGAGCAGGACAAGAAUACCCAGGAGGUGUUUGCUCAGGUGAAGCAAAUCUAUAAGACCCCUCCCAUCAAGGACU |
| | | UUGGCGGCUUCAACUUUUCCCAGAUCCUGCCCGACCCUUCCAAGCCCUCCAAACGCUCUUUCAUCGAAGAUCUGC |
| | | UGUUCAAUAAAGUGACCCUGGCCGACGCCGGCUUCAUCAAGCAGUACGGAGACUGUCUGGGAGACAUUGCUGCU |
| | | CGCGACCUGAUUUGCGCCCAGAAGUUCAACGGCCUGACCGUGCUGCCCCCUCUGCUGACCGACGAGAUGAUCGC |
| | | UCAGUACACCUCCGCCCUGCUGGCUGGCACUAUCACCUCCGGCUGGACUUUCGGCGCUGGCGCCGCCCUGCAGA |
| | | UUCCCUUCGCCAUGCAGAUGGCUUAUCGCUUCAACGGAAUCGGAGUGACACAGAACGUGCUGUACGAGAAUCAGA |
| | | AACUGAUCGCUAACCAGUUUAAUUCCGCCAUUGGCAAGAUCCAGGACUCCCUGUCCUCUACUGCUUCCGCCCUGG |
| | | GCAAGCUGCAGGACGUGGUGAACCAGAACGCCCAGGCUCUGAACACCCUGGUGAAGCAACUGUCUUCUAACUUUG |
| | | GAGCCAUUUCUUCCGUGCUGAACGACAUCCUGUCCAGACUGGAUCCUCCUGAGGCCGAGGUGCAGAUCGACCGC |
| | | CUGAUCACUGGCCGCCUGCAGUCCCUGCAGACUUACGUUACCCAGCAAUUAAUCCGCGCUGCCGAGAUCCGCGC |
| | | CUCCGCCAACCUGGCCGCCACCAAGAUGUCCGAGUGCGUUCUGGGCCAGUCCAAACGCGUUGACUUCUGCGGCA |
| | | AGGGCUACCACCUGAUGUCCUUCCCCCAGUCCGCUCCCCACGGAGUGGUGUUCCUGCACGUGACCUACGUGCCU |
| | | GCCCAGGAGAAGAACUUCACCACCGCCCCCGCCAUUUGCCACGACGGAAAGGCCCACUUCCCCCGCGAGGGAGU |
| | | GUUCGUUUCUAACGGCACUCACUGGUUCGUGACCCAGAGAAACUUCUACGAGCCCCAGAUUAUUACCACCGACAA |
| | | UACCUUCGUUUCUGGCAACUGCGACGUGGUUAUCGGCAUCGUGAACAACACCGUGUACGACCCCCUGCAACCCGA |
| | | GCUGGAUUCUUUCAAGGAGGAGCUGGAUAAGUACUUUAAAAACCAUACCUCCCCCGACGUGGACCUGGGCGACAU |
| | | CUCUGGCAUCAACGCCUCCGUGGUGAAUAUCCAGAAGGAGAUCGAUCGCCUGAACGAGGUGGCCAAGAACUUAAA |
| | | CGAAUCUCUGAUCGACCUGCAGGAGCUGGGCAAGUACGAGCAGUAUAUUAAGUGGCCCUGGUAUAUCUGGUUAG |
| | | GCUUUAUCGCCGGCCUGAUCGCCAUUGUUAUGGUGACCAUCAUGCUGUGCUGCAUGACCUCCUGCUGUUCCUGU |
| | | UUAAAAGGCUGCUGCUCCUGCGGAUCCUGCUGUAAAUUCGACGAAGACGACUCCGAGCCCGUGCUGAAAGGAGU |
| | | UAAGUUACACUAUACCUAAAUGAGACCAUA |
| 158 | 2A5681 | AUAGGUCUCACACACUAGGGCGCGCCAGUCCUCAAGCUGGGCCUGACACAACUGUGUUCACUAGCAACUACUCCC |
| | | AGACACCAUGGUACUCCCGACUCCUGAGGUACUCCCUGCCGUUACUGCCCUGUGGGGCAAGGUGAUACUCCCUG |
| | | AAGUUGGUGGUGAGGCCCUGGGCAGGCUACUCCCGGUCUACCCUUGGACCCAGAGGUCGACUCGGACCGGCCAC |
| | | CAUGUUCGUGUUCCUGGUGCUGCUGCCCCUGGUGUCCUCCCAGUGCGUCAACCUGACCACCCGGACCCAACUGC |
| | | CCCCUGCCUAUACCAAUUCCUUCACCCGGGGCGUCUACUACCCCGACAAGGUGUUCCGGUCCUCUGUGCUCCAC |
| | | UCCACCCAGGACCUCUUCCUCCCCUUUUUCUCCAACGUGACCUGGUUCCACGCCAUCCACGUGUCUGGCACAAAC |
| | | GGAACCAAGCGCUUCGACAACCCUGUGCUCCCCUUCAACGACGGCGUGUACUUCGCCUCCACCGAGAAGUCCAAC |
| | | AUCAUCCGCGGCUGGAUCUUCGGCACCACCCUCGACUCUAAGACCCAGUCCCUGCUGAUUGUGAAUAACGCCACC |
| | | AACGUGGUGAUCAAGGUGUGCGAAUUUCAGUUCUGCAACGACCCCUUCCUGGGCGUUUACUACCAUAAGAACAAC |
| | | AAGUCCUGGAUGGAGUCCGAGUUCCGGGUGUAUUCCUCUGCCAAUAACUGCACCUUUGAGUACGUGUCCCAGCC |
| | | CUUCCUGAUGGACCUGGAGGGCAAGCAGGGCAAUUUUAAAAACCUGCGCGAGUUCGUGUUCAAGAACAUCGACG |
| | | GCUACUUCAAGAUCUAUUCCAAGCACACCCCUAUCAACCUGGUGCGCGACCUGCCCCAGGGCUUUUCCGCUCUGG |
| | | AGCCCCUGGUUGACCUGCCCAUCGGCAUCAACAUCACCCGCUUCCAGACUUUACUGGCCCUGCACCGCUCCUACC |
| | | UGACCCCCGGCGAUUCCUCUUCUGGCUGGACAGCCGGAGCCGCUGCCUACUACGUGGGAUACCUGCAGCCCCGC |
| | | ACCUUCCUGCUGAAGUACAACGAGAACGGAACCAUUACAGACGCUGUCGACUGUGCUCUGGAUCCCCUGUCCGAA |
| | | ACAAAGUGCACCCUGAAGUCCUUCACCGUGGAGAAGGGCAUCUACCAGACCUCCAACUUCCGCGUGCAGCCCACC |
| | | GAGUCCAUCGUGAGAUUCCCCAACAUCACUAACCUGUGCCCCUUCGGCGAGGUGUUCAACGCCACCCGCUUCGC |
| | | CUCCGUGUACGCCUGGAACCGCAAGCGCAUCUCCAACUGCGUUGCCGACUACUCUGUGCUCUACAACUCCGCCU |
| | | CCUUCUCCACCUUCAAGUGCUACGGCGUGUCCCCCACCAAGCUGAACGACCUGUGCUUCACCAACGUGUACGCCG |
| | | ACUCCUUCGUGAUCCGCGGCGACGAGGUGCGCCAGAUCGCCCCCGGCCAGACCGGAAAGAUCGCCGAUUACAAU |
| | | UACAAGCUGCCCGACGACUUCACCGGCUGCGUGAUCGCCUGGAACUCCAACAAUCUGGACUCCAAGGUUGGCGG |
| | | CAACUACAACUACCUGUACCGCCUGUUCCGCAAGUCCAACCUGAAGCCCUUCGAGCGGGACAUUUCCACAGAGAU |
| | | UUACCAGGCUGGCUCCACCCCCUGUAACGGAGUGGAGGGCUUCAACUGCUACUUCCCCCUGCAGUCCUACGGCU |
| | | UCCAGCCCACCAACGGCGUGGGCUACCAGCCCUACCGCGUGGUGGUGCUGUCCUUCGAGCUGCUGCACGCCCCU |
| | | GCCACCGUGUGCGGCCCCAAGAAGUCCACCAACCUGGUGAAGAACAAGUGCGUGAACUUCAACUUCAACGGACUG |
| | | ACAGGCACCGGCGUGCUGACCGAGUCCAACAAGAAGUUCCUGCCCUUCCAGCAGUUCGGCCGGGACAUUGCCGA |
| | | CACCACCGACGCCGUGCGCGACCCCCAGACCCUGGAGAUCCUGGACAUCACCCCCUGCUCCUUCGGCGGAGUGU |
| | | CCGUGAUCACCCCCGGCACCAACACCUCCAACCAGGUUGCCGUGCUGUACCAGGACGUUAACUGCACCGAGGUG |
| | | CCCGUGGCCAUCCACGCCGACCAGCUGACCCCCACCUGGCGCGUGUACUCCACCGGCUCCAACGUGUUCCAGAC |
| | | CCGCGCCGGCUGCCUGAUCGGCGCCGAGCACGUGAACAACUCCUACGAGUGCGACAUCCCCAUUGGCGCCGGCA |
| | | UCUGCGCCUCCUACCAGACCCAGACCAACUCCCCUCGCCGCGCCCGGUCCGUCGCCUCCCAGUCCAUCAUCGCC |
| | | UACACCAUGUCCCUGGGCGCCGAGAACUCCGUGGCCUACUCCAACAACUCCAUUGCCAUCCCCACCAACUUCACC |
| | | AUCUCCGUGACCACCGAAAUCCUCCCCGUGUCCAUGACCAAGACCUCCGUGGACUGCACCAUGUACAUCUGCGGC |
| | | GACUCCACCGAGUGCUCCAACCUGCUGCUGCAGUACGGCUCCUUCUGCACCCAGCUGAAUCGCGCCCUGACCGG |
| | | CAUCGCCGUGGAGCAGGACAAGAACACCCAAGAGGUGUUCGCCCAGGUGAAGCAGAUCUACAAGACACCUCCCAU |
| | | CAAGGACUUCGGCGGCUUCAACUUCUCCCAGAUCCUGCCCGACCCCUCCAAGCCCUCCAAGCGCUCCUUCAUCGA |
| | | GGACCUGCUGUUCAACAAGGUGACCCUGGCCGACGCCGGCUUCAUCAAGCAGUACGGCGACUGUCUGGGAGACA |
| | | UUGCCGCCCGCGACCUGAUCUGCGCCCAGAAGUUCAACGGCUUAACCGUGCUGCCCCCUCUGCUGACCGACGAG |
| | | AUGAUCGCCCAGUACACAUCCGCUCUGCUGGCCGGCACCAUCACCUCCGGCUGGACCUUUGGCGCUGGCGCUGC |
| | | CCUGCAGAUCCCCUUCGCUAUGCAGAUGGCCUACCGCUUCAACGGCAUCGGCGUGACCCAGAACGUGCUGUACG |
| | | AGAACCAGAAGCUGAUCGCCAACCAGUUCAACUCCGCCAUCGGCAAGAUCCAGGACUCCCUGUCCUCCACCGCCU |
| | | CCGCCCUGGGCAAGCUGCAGGACGUGGUGAACCAGAACGCCCAGGCCCUGAACACCCUGGUGAAGCAGCUGUCC |
| | | UCUAACUUCGGCGCCAUCUCCUCCGUGCUGAACGACAUUCUGUCCCGCCUGGAUCCUCCUGAGGCCGAGGUGCA |
| | | AAUCGAUCGCCUCAUCACCGGCCGCCUGCAGUCCCUGCAGACCUACGUGACACAGCAGCUGAUCCGCGCCGCCG |
| | | AGAUCCGCGCCUCCGCCAACCUGGCCGCCACCAAGAUGUCUGAGUGCGUGCUGGGCCAGUCCAAACGCGUUGAC |
| | | UUCUGCGGCAAGGGCUACCACCUGAUGUCCUUCCCCCAGUCCGCCCCCCACGGCGUGGUGUUCCUGCACGUGAC |
| | | CUACGUGCCCGCCCAGGAGAAGAACUUCACUACCGCCCCCGCCAUCUGCCACGACGGCAAGGCCCACUUCCCCCG |
| | | CGAGGGCGUGUUCGUGUCCAACGGCACCCACUGGUUCGUGACCCAGCGCAACUUCUACGAGCCCCAGAUCAUCA |
| | | CCACCGACAACACCUUCGUGUCCGGCAACUGCGACGUGGUGAUUGGCAUCGUGAACAACACCGUGUACGACCCCC |
| | | UGCAGCCCGAGCUGGACUCCUUCAAGGAGGAGCUGGACAAGUACUUUAAGAACCACACCUCCCCCGACGUGGACC |
| | | UGGGCGACAUCUCCGGCAUCAACGCCUCCGUGGUGAACAUCCAGAAGGAGAUCGACCGCCUGAACGAGGUGGCC |
| | | AAGAACCUGAACGAGUCCCUGAUCGACCUGCAGGAGCUGGGCAAGUACGAACAGUACAUCAAGUGGCCCUGGUAC |
| | | AUCUGGCUGGGCUUCAUCGCCGGCCUGAUCGCCAUCGUGAUGGUGACCAUCAUGCUGUGCUGCAUGACCUCUUG |
| | | CUGUUCCUGUCUGAAGGGCUGCUGCUCCUGCGGCUCCUGCUGCAAGUUCGACGAGGACGACUCCGAGCCCGUGC |
| | | UGAAGGGCGUGAAGCUGCACUACACCUAAAUGAGACCAUA |
| 159 | 2A6681 | AUAGGUCUCACACACUAGGGCGCGCCAGUCCUCAAGCUGGGCCUGACACAACUGUGUUCACUAGCAACUACUCCC |
| | | AGACACCAUGGUACUCCCGACUCCUGAGGUACUCCCUGCCGUUACUGCCCUGUGGGGCAAGGUGAUACUCCCUG |
| | | AAGUUGGUGGUGAGGCCCUGGGCAGGCUACUCCCGGUCUACCCUUGGACCCAGAGGUCGACUCGGACCGGCCAC |
| | | CAUGUUCGUGUUCCUGGUGCUGCUCCCCCUGGUGAGCUCCCAGUGCGUCAACCUGACCACACGGACCCAGCUGC |
| | | CCCCCGCCUAUACCAACAGCUUCACCCGCGGCGUCUACUACCCCGACAAGGUGUUCCGGAGCAGCGUGCUGCAC |
| | | AGCACCCAGGACCUCUUCCUCCCCUUUUUUAGCAACGUGACCUGGUUCCACGCCAUCCACGUGAGUGGCACCAAC |
| | | GGCACCAAGCGGUUCGACAACCCUGUGCUCCCCUUCAACGACGGCGUGUACUUCGCUAGCACAGAAAAAAGUAAC |
| | | AUCAUUCGGGGCUGGAUCUUCGGCACCACACUGGAUAGCAAAACCCAGAGCCUGCUGAUUGUGAAUAACGCCACC |
| | | AACGUGGUGAUCAAGGUGUGCGAGUUCCAGUUCUGCAACGACCCCUUCCUGGGCGUGUACUACCACAAGAACAAC |
| | | AAGAGCUGGAUGGAGAGCGAGUUCCGCGUGUAUAGCUCUGCCAACAACUGCACCUUCGAGUACGUGAGCCAGCC |
| | | CUUCCUGAUGGACCUGGAGGGCAAGCAGGGCAAUUUCAAAAACCUGCGGGAGUUCGUGUUCAAGAACAUCGACG |
| | | GCUACUUCAAGAUCUACAGCAAGCACACCCCCAUCAACCUGGUGCGGGACCUGCCCCAGGGCUUUAGCGCUCUG |
| | | GAGCCCCUGGUGGACCUGCCCAUCGGCAUCAACAUCACCCGCUUCCAAACCCUGUUGGCCCUGCACCGGAGCUA |
| | | CCUGACCCCUGGCGAUAGCAGUAGUGGCUGGACAGCCGGAGCCGCCGCCUACUACGUGGGAUACCUGCAGCCCC |
| | | GGACCUUCCUGCUGAAGUACAACGAGAACGGCACAAUCACAGACGCCGUGGACUGCGCCCUGGACCCCCUGAGC |
| | | GAAACAAAGUGCACCCUCAAAAGUUUCACCGUGGAGAAGGGCAUCUACCAGACCAGCAACUUCCGGGUGCAGCCC |
| | | ACCGAGAGCAUCGUGCGGUUCCCCAACAUCACCAACCUGUGCCCCUUCGGCGAGGUGUUCAACGCCACCCGGUU |
| | | CGCCAGCGUGUACGCCUGGAACCGGAAGCGGAUCAGCAACUGCGUGGCCGACUACAGCGUGCUGUAUAACAGUG |
| | | CCAGCUUCAGCACCUUCAAGUGCUACGGCGUGAGCCCCACCAAGCUGAACGACCUGUGCUUCACCAACGUGUACG |
| | | CCGACAGCUUCGUGAUCCGGGGCGACGAGGUGCGGCAGAUCGCCCCCGGCCAGACCGGCAAGAUCGCCGAUUAC |
| | | AAUUACAAGCUGCCCGACGAUUUCACCGGCUGCGUGAUCGCCUGGAACAGCAACAACCUGGACAGCAAGGUGGGC |
| | | GGCAACUACAACUACCUGUACCGGCUGUUCCGCAAAAGUAACCUGAAGCCCUUCGAGCGGGACAUCAGCACCGAG |
| | | AUCUACCAGGCCGGCAGUACCCCUUGCAACGGCGUCGAGGGCUUCAACUGCUACUUCCCCCUGCAGAGCUACGG |
| | | CUUCCAGCCCACCAACGGCGUGGGCUACCAGCCCUACCGGGUGGUGGUUCUGAGCUUCGAGCUGCUGCACGCCC |
| | | CUGCCACCGUGUGCGGCCCCAAGAAAAGCACCAACCUGGUGAAGAACAAGUGCGUGAAUUUCAAUUUUAACGGAC |
| | | UCACCGGAACCGGCGUGCUGACCGAGAGCAACAAGAAGUUCCUGCCCUUCCAGCAAUUCGGCCGGGAUAUUGCC |
| | | GACACCACUGACGCCGUGCGGGACCCCCAGACCCUGGAGAUCCUGGACAUCACACCCUGUAGCUUCGGCGGGGU |
| | | GAGCGUGAUCACCCCCGGCACCAACACCAGCAACCAGGUGGCCGUGCUGUACCAGGACGUGAACUGCACCGAGG |
| | | UGCCCGUGGCCAUCCACGCCGACCAGCUGACCCCCACCUGGGGGGUGUACAGCACCGGCAGCAACGUGUUCCAG |
| | | ACCCGGGCCGGCUGCCUGAUCGGCGCCGAGCACGUGAAUAACAGCUACGAGUGCGACAUCCCCAUCGGAGCCGG |
| | | AAUCUGCGCCAGCUACCAGACCCAGACCAACAGCCCCCGGAGAGCCCGGAGCGUGGCCAGCCAGAGCAUUAUUGC |
| | | CUACACCAUGAGCCUGGGCGCCGAGAACAGCGUGGCCUACAGCAACAAUAGUAUUGCCAUCCCCACCAACUUCAC |
| | | CAUCAGCGUGACCACCGAAAUCCUCCCCGUGAGCAUGACCAAGACCAGCGUGGACUGCACCAUGUACAUCUGCGG |
| | | CGACAGCACCGAGUGCAGCAACCUGCUCCUGCAGUACGGCAGCUUCUGCACCCAGCUGAACCGGGCCCUGACCG |
| | | GAAUUGCCGUGGAGCAGGACAAGAACACCCAGGAGGUGUUCGCCCAGGUGAAGCAGAUCUACAAGACACCUCCCA |
| | | UCAAGGACUUCGGCGGCUUCAACUUCAGCCAGAUCCUGCCCGACCCCAGCAAGCCCAGCAAGCGGAGCUUCAUCG |
| | | AGGACCUGUUGUUCAACAAGGUGACCCUGGCCGACGCCGGCUUCAUCAAGCAGUACGGCGACUGUCUGGGAGAU |
| | | AUUGCCGCACGGGACCUGAUCUGCGCCCAGAAGUUCAACGGCCUGACCGUGCUGCCCCCACUGCUGACCGACGA |
| | | GAUGAUCGCCCAGUACACAAGCGCUCUGCUCGCCGGCACCAUCACCAGCGGCUGGACCUUCGGCGCCGGCGCUG |
| | | CCCUGCAGAUCCCCUUCGCCAUGCAGAUGGCCUACCGGUUCAACGGCAUCGGCGUGACCCAGAACGUGCUGUAC |
| | | GAGAACCAGAAGCUGAUCGCCAACCAGUUCAACAGCGCCAUCGGCAAGAUCCAGGACAGCCUGAGCUCCACCGCC |
| | | AGCGCCCUGGGCAAGCUGCAGGACGUGGUGAACCAGAACGCCCAGGCCCUGAACACCCUGGUGAAGCAGCUGAG |
| | | CAGCAACUUCGGCGCCAUCAGCUCUGUGCUGAACGACAUCCUGAGCCGGCUGGAUCCUCCUGAGGCCGAGGUGC |
| | | AAAUCGAUCGGCUCAUCACCGGCCGGCUGCAGAGCCUGCAGACCUACGUGACACAGCAGCUGAUCCGGGCCGCC |
| | | GAGAUCCGGGCCAGCGCCAACCUGGCCGCUACCAAGAUGAGCGAGUGCGUGCUGGGCCAGAGCAAGCGGGUGGA |
| | | CUUCUGCGGCAAGGGCUACCACCUGAUGAGCUUCCCCCAGAGCGCCCCCCACGGCGUGGUGUUCCUGCACGUGA |
| | | CCUACGUGCCCGCCCAGGAGAAGAACUUCACCACCGCCCCCGCCAUCUGCCACGACGGCAAGGCCCACUUCCCCC |
| | | GGGAGGGCGUGUUCGUGAGCAACGGCACCCACUGGUUCGUGACCCAGCGGAACUUCUACGAGCCCCAGAUCAUA |
| | | ACCACAGACAACACCUUCGUGAGCGGCAACUGCGACGUGGUCAUCGGCAUCGUGAACAACACCGUGUACGACCCC |
| | | CUGCAGCCCGAGCUGGACAGCUUCAAGGAGGAACUGGACAAGUACUUCAAGAACCACACCAGCCCCGACGUGGAC |
| | | CUGGGCGACAUCAGCGGCAUCAACGCCAGCGUGGUGAACAUCCAGAAGGAGAUCGACCGGCUGAACGAGGUGGC |
| | | CAAGAACCUGAACGAGAGCCUGAUCGACCUGCAGGAGCUGGGCAAGUACGAGCAGUACAUCAAGUGGCCCUGGUA |
| | | CAUCUGGCUGGGCUUUAUUGCCGGCCUGAUCGCCAUCGUGAUGGUGACCAUCAUGCUGUGCUGUAUGACAAGCU |
| | | GUUGCAGUUGCCUGAAGGGCUGCUGCAGCUGCGGCAGCUGCUGCAAGUUCGACGAGGACGACAGCGAGCCCGU |
| | | GCUGAAGGGCGUGAAGCUGCACUACACCUAAAUGAGACCAUA |
| 160 | P51 | AUGUACCGGAUGCAGUUGUUGUCCUGUAUAGCUCUUUCCCUUGCAUUGGUCACUAAUUCUGUGAACCUCACCACU |
| | | CGCACACAGCUACCUCCCGCGUACACUAAUUCAUUUACCAGGGGCGUCUAUUAUCCUGAUAAGGUGUUCCGGAGU |
| | | UCAGUGUUGCAUAGCACUCAAGACCUGUUCCUGCCCUUCUUCUCCAAUGUCACUUGGUUUCAUGCGAUACAUGUG |
| | | UCUGGUACCAACGGAACGAAGAGAUUUGAUAACCCCGUACUGCCAUUCAAUGAUGGCGUAUACUUUGCUUCGACU |
| | | GAAAAAUCCAACAUCAUCAGGGGCUGGAUUUUUGGUACAACGCUUGAUUCCAAGACCCAGUCCCUCCUUAUUGUG |
| | | AACAAUGCGACCAACGUCGUGAUAAAGGUCUGUGAGUUUCAGUUCUGCAAUGACCCAUUCCUUGGAGUGUAUUAU |
| | | CACAAGAACAACAAAUCGUGGAUGGAGUCAGAGUUUAGGGUGUACAGCAGCGCUAACAACUGUACAUUUGAGUAU |
| | | GUGAGUCAGCCGUUUCUGAUGGAUCUUGAGGGCAAACAGGGCAAUUUUAAGAAUCUCAGAGAAUUUGUGUUCAAG |
| | | AACAUUGAUGGUUACUUUAAGAUCUAUAGCAAACAUACGCCAAUCAACUUGGUUCGUGAUCUGCCACAGGGAUUU |
| | | AGCGCACUGGAACCUCUCGUUGACUUGCCCAUAGGUAUUAACAUCACCAGGUUCCAGACGCUCUUGGCAUUACAC |
| | | CGUAGUUAUCUGACCCCCGGGGACUCCAGUUCCGGAUGGACUGCAGGAGCCGCUGCCUACUAUGUGGGUUACCU |
| | | CCAGCCCAGGACCUUUCUUUUGAAAUAUAACGAGAACGGCACAAUCACUGAUGCUGUGGACUGCGCAUUGGAUCC |
| | | UUUGUCAGAGACUAAGUGCACUCUGAAGUCAUUCACAGUCGAGAAAGGCAUUUACCAGACGUCUAACUUCAGGGU |
| | | UCAGCCUACUGAGUCCAUCGUGAGAUUCCCAAACAUCACAAAUCUUUGUCCCUUCGGUGAGGUAUUCAAUGCGAC |
| | | ACGAUUUGCCUCAGUGUACGCGUGGAAUCGGAAGAGGAUCUCCAAUUGCGUGGCCGACUACUCCGUCUUAUACAA |
| | | CUCAGCUAGCUUUUCAACAUUCAAGUGCUAUGGCGUGAGCCCUACCAAGCUCAAUGACCUGUGCUUCACUAAUGU |
| | | GUAUGCCGACUCUUUUGUCAUUCGCGGCGACGAGGUCCGACAAAUCGCACCGGGCCAAACCGGUAAAAUUGCCG |
| | | ACUACAACUACAAGCUGCCUGACGACUUCACCGGCUGCGUAAUCGCCUGGAACAGCAAUAACCUGGAUAGCAAAG |
| | | UGGGCGGAAACUACAACUACCUGUACCGGCUCUUUAGAAAGUCCAACCUGAAACCAUUCGAGCGCGAUAUCUCGA |
| | | CCGAAAUCUACCAGGGGGGCAGCACCCCCUGUAAUGGUGUAGAAGGGUUCAAUUGUUACUUUCCACUCCAGAGUU |
| | | AUGGGUUCCAGCCGACCAAUGGCGUCGGUUAUCAACCAUAUCGCGUUGUGGUGUUGUCCUUUGAGCUGCUACAC |
| | | GCCCCAGCUACAGUGUGCGGGCCAAAGAAAAGCACAAAUCUUGUCAAGAACAAAUGCGUUAACUUUAAUUUUAAUG |
| | | GACUCACAGGUACAGGAGUCCUGACCGAAUCUAAUAAGAAGUUCCUGCCCUUUCAACAGUUCGGACGAGACAUUG |
| | | CCGACACCACCGAUGCCGUUCGGGACCCACAGACCUUAGAAAUUCUGGAUAUUACUCCAUGUAGUUUUGGGGGAG |
| | | UGUCUGUCAUCACCCCUGGCACUAAUACAUCUAACCAGGUUGCAGUCCUCUACCAGGAUGUGAACUGUACCGAAG |
| | | UGCCGGUCGCUAUUCACGCAGACCAGCUCACUCCUACCUGGGGGGUGUACUCCACAGGCUCUAACGUGUUUCAG |
| | | ACACGUGCAGGGUGCCUAAUCGGCGCAGAGCAUGUAAAUAACUCCUAUGAGUGUGAUAUCCCCAUCGGAGCCGG |
| | | GAUCUGCGCUUCCUACCAGACACAAACGAAUAGUCCCGGAUCUGCCUCAAGCGUGGCAUCUCAAUCCAUUAUAGC |
| | | AUAUACGAUGUCCCUUGGAGCUGAAAACAGCGUUGCGUAUUCAAACAAUAGUAUCGCUAUUCCAACCAAUUUUACA |
| | | AUUAGCGUGACCACAGAAAUACUCCCUGUGAGCAUGACCAAGACCAGUGUAGACUGUACUAUGUACAUCUGCGGC |
| | | GACAGUACUGAGUGUAGCAAUCUGCUGCUACAGUAUGGGUCCUUCUGUACUCAGCUUAAUCGGGCUCUCACCGG |
| | | AAUCGCUGUAGAGCAAGAUAAAAACACACAAGAAGUGUUUGCUCAAGUGAAGCAGAUCUAUAAGACACCUCCCAUC |
| | | AAGGAUUUCGGUGGGUUCAACUUUAGCCAGAUUCUGCCCGAUCCGUCUAAACCGUCCAAGCGAAGUUUCAUCGAA |
| | | GACCUGCUUUUCAAUAAGGUCACGCUGGCAGAUGCUGGAUUUAUCAAACAGUACGGCGACUGUCUGGGCGAUAU |
| | | CGCCGCAAGAGACUUGAUAUGCGCCCAAAAGUUUAAUGGGUUAACCGUCCUUCCACCGCUCCUGACAGACGAGAU |
| | | GAUCGCCCAGUAUACAAGUGCCUUAUUAGCUGGGACCAUUACUAGUGGAUGGACAUUUGGCGCCGGGGCUGCUC |
| | | UACAGAUACCCUUCGCCAUGCAGAUGGCUUACCGCUUCAACGGAAUCGGAGUUACCCAGAACGUACUGUACGAAA |
| | | AUCAGAAACUCAUAGCUAAUCAAUUUAACUCUGCCAUCGGGAAGAUUCAGGAUUCCCUGUCGUCUACAGCGUCCG |
| | | CCUUGGGGAAACUGCAAGAUGUAGUGAACCAGAACGCCCAGGCCUUAAAUACUCUGGUCAAGCAGUUAUCUUCAA |
| | | AUUUCGGAGCAAUUAGCUCUGUGUUGAACGAUAUUCUUUCCAGGCUGGACCCUCCAGAAGCCGAAGUGCAAAUAG |
| | | ACCGGCUCAUCACGGGGCGCUUGCAAAGCCUGCAAACCUAUGUCACCCAGCAACUGAUUCGAGCAGCCGAGAUCC |
| | | GGGCCAGUGCUAAUCUGGCCGCCACAAAAAUGAGCGAGUGCGUCCUCGGGCAGAGCAAACGCGUAGACUUCUGC |
| | | GGUAAAGGCUAUCACCUGAUGAGCUUCCCUCAGAGCGCACCCCACGGGGUGGUCUUCCUCCACGUUACCUACGU |
| | | CCCUGCGCAGGAGAAGAACUUCACUACGGCCCCUGCAAUUUGCCACGAUGGCAAGGCCCACUUUCCCAGGGAGG |
| | | GGGUCUUCGUUUCCAACGGGACUCAUUGGUUCGUGACUCAGAGAAAUUUUUAUGAACCUCAGAUCAUUACCACUG |
| | | AUAAUACAUUCGUGUCUGGCAACUGUGAUGUGGUUAUUGGGAUAGUUAAUAAUACGGUAUACGACCCACUCCAGC |
| | | CCGAGCUGGACUCCUUCAAAGAGGAGCUGGACAAGUACUUUAAAAAUCACACCUCACCUGAUGUGGACCUAGGUG |
| | | ACAUAUCUGGCAUAAAUGCUAGCGUGGUUAACAUUCAGAAGGAAAUCGACAGACUCAACGAGGUGGCCAAAAAUC |
| | | UGAACGAGAGUCUGAUCGACCUGCAGGAGUUGGGAAAAUAUGAACAGGGGUAUAUCCCUGAAGCCCCCAGGGAC |
| | | GGCCAGGCUUACGUCAGAAAGGAUGGAGAGUGGGUGCUCUUGAGCACCUUCCUGUAA |
| 161 | P53 | AUGGGAGUCAAAGUUCUGUUUGCCCUGAUCUGCAUCGCUGUGGCCGAGGCCAAGGUUAAUCUUACAACCAGAACU |
| | | CAAUUACCCCCUGCAUACACUAAUUCUUUCACACGUGGUGUUUAUUACCCUGACAAAGUUUUCAGAUCCUCAGUU |
| | | UUACAUUCAACUCAGGACUUGUUCUUACCUUUCUUUUCCAAUGUUACUUGGUUCCAUGCUAUACAUGUCUCUGGG |
| | | ACCAAUGGUACUAAGAGGUUUGAUAACCCUGUCCUACCAUUUAAUGAUGGUGUUUAUUUUGCUUCCACUGAGAAG |
| | | UCUAACAUAAUAAGAGGCUGGAUUUUUGGUACUACUUUAGAUUCGAAGACCCAGUCCCUACUUAUUGUUAAUAAC |
| | | GCUACUAAUGUUGUUAUUAAAGUCUGUGAAUUUCAAUUUUGUAAUGAUCCAUUUUUGGGUGUUUAUUACCACAAA |
| | | AACAACAAAAGUUGGAUGGAAAGUGAGUUCAGAGUUUAUUCUAGUGCGAAUAAUUGCACUUUUGAAUAUGUCUCU |
| | | CAGCCUUUUCUUAUGGACCUUGAAGGAAAACAGGGUAAUUUCAAAAAUCUUAGGGAAUUUGUGUUUAAGAAUAUU |
| | | GAUGGUUAUUUUAAAAUAUAUUCUAAGCACACGCCUAUUAAUUUAGUGCGUGAUCUCCCUCAGGGUUUUUCGGCU |
| | | UUAGAACCAUUGGUAGAUUUGCCAAUAGGUAUUAACAUCACUAGGUUUCAAACUUUACUUGCUUUACAUAGAAGUU |
| | | AUUUGACUCCUGGUGAUUCUUCUUCAGGUUGGACAGCUGGUGCUGCAGCUUAUUAUGUGGGUUAUCUUCAACCU |
| | | AGGACUUUUCUAUUAAAAUAUAAUGAAAAUGGAACCAUUACAGAUGCUGUAGACUGUGCACUUGACCCUCUCUCAG |
| | | AAACAAAGUGUACGUUGAAAUCCUUCACUGUAGAAAAAGGAAUCUAUCAAACUUCUAACUUUAGAGUCCAACCAAC |
| | | AGAAUCUAUUGUUAGAUUUCCUAAUAUUACAAACUUGUGCCCUUUUGGUGAAGUUUUUAACGCCACCAGAUUUGC |
| | | AUCCGUGUAUGCUUGGAACAGGAAGAGAAUCAGCAACUGUGUUGCUGAUUAUUCUGUCCUAUAUAAUUCCGCAUC |
| | | AUUUUCCACUUUUAAGUGUUAUGGAGUGUCUCCUACUAAAUUAAAUGAUCUCUGCUUUACUAAUGUCUAUGCAGA |
| | | UUCAUUUGUAAUUAGAGGUGAUGAAGUCAGACAAAUCGCUCCAGGGCAAACUGGAAAGAUUGCUGAUUAUAAUUA |
| | | UAAAUUACCAGAUGAUUUUACAGGCUGCGUUAUAGCUUGGAAUUCUAACAAUCUUGAUUCUAAGGUUGGUGGUAA |
| | | UUAUAAUUACCUGUAUAGAUUGUUUAGGAAGUCUAAUCUCAAACCUUUUGAGAGAGAUAUUUCAACUGAAAUCUAU |
| | | CAGGCCGGUAGCACACCUUGUAAUGGUGUUGAAGGUUUUAAUUGUUACUUUCCUUUACAAUCAUAUGGUUUCCAA |
| | | CCCACUAAUGGUGUUGGUUACCAACCAUACAGAGUAGUAGUACUUUCUUUUGAACUUCUACAUGCACCAGCAACU |
| | | GUUUGUGGACCUAAAAAGUCUACUAAUUUGGUUAAAAACAAAUGUGUCAAUUUCAACUUCAAUGGUUUAACAGGCA |
| | | CAGGUGUUCUUACUGAGUCUAACAAAAAGUUUCUGCCUUUCCAACAAUUUGGCAGAGACAUUGCUGACACUACUG |
| | | AUGCUGUCCGUGAUCCACAGACACUUGAGAUUCUUGACAUUACACCAUGUUCUUUUGGUGGUGUCAGUGUUAUAA |
| | | CACCAGGAACAAAUACUUCUAACCAGGUUGCUGUUCUUUAUCAGGAUGUUAACUGCACAGAAGUCCCUGUUGCUA |
| | | UUCAUGCAGAUCAACUUACUCCUACUUGGCGUGUUUAUUCUACAGGUUCUAAUGUUUUUCAAACACGUGCAGGCU |
| | | GUUUAAUAGGGGCUGAACAUGUCAACAACUCAUAUGAGUGUGACAUACCCAUUGGUGCAGGUAUAUGCGCUAGUU |
| | | AUCAGACUCAGACUAAUUCUCCUGGCAGCGCCAGCAGUGUAGCUAGUCAAUCCAUCAUUGCCUACACUAUGUCAC |
| | | UUGGUGCAGAAAAUUCAGUUGCUUACUCUAAUAACUCUAUUGCCAUACCCACAAAUUUUACUAUUAGUGUUACCAC |
| | | AGAAAUUCUACCAGUGUCUAUGACCAAGACAUCAGUAGAUUGUACAAUGUACAUUUGUGGUGAUUCAACUGAAUG |
| | | CAGCAAUCUUUUGUUGCAAUAUGGCAGUUUUUGUACACAAUUAAACCGUGCUUUAACUGGAAUAGCUGUUGAACA |
| | | AGACAAAAACACCCAAGAAGUUUUUGCACAAGUCAAACAAAUUUACAAAACACCACCAAUUAAAGAUUUUGGUGGU |
| | | UUUAAUUUUUCACAAAUAUUACCAGAUCCAUCAAAACCAAGCAAGAGGUCAUUUAUUGAAGAUCUACUUUUCAACA |
| | | AAGUGACACUUGCAGAUGCUGGCUUCAUCAAACAAUAUGGUGAUUGCCUUGGUGAUAUUGCUGCUAGGGACCUCA |
| | | UUUGUGCACAAAAGUUUAACGGCCUUACUGUUUUGCCACCUUUGCUCACAGAUGAAAUGAUUGCUCAAUACACUU |
| | | CUGCACUGUUAGCGGGUACAAUCACUUCUGGUUGGACCUUUGGUGCAGGUGCUGCAUUACAAAUACCAUUUGCU |
| | | AUGCAAAUGGCUUAUAGGUUUAAUGGUAUUGGAGUUACACAGAAUGUUCUCUAUGAGAACCAAAAAUUGAUUGCC |
| | | AACCAAUUUAAUAGUGCUAUUGGCAAAAUUCAAGACUCACUUUCUUCCACAGCAAGUGCACUUGGAAAACUUCAAG |
| | | AUGUGGUCAACCAAAAUGCACAAGCUUUAAACACGCUUGUUAAACAACUUAGCUCCAAUUUUGGUGCAAUUUCAAG |
| | | UGUUUUAAAUGAUAUCCUUUCACGUCUUGACCCUCCCGAGGCUGAAGUGCAAAUUGAUAGGUUGAUCACAGGCAG |
| | | ACUUCAAAGUUUGCAGACAUAUGUGACUCAACAAUUAAUUAGAGCUGCAGAAAUCAGAGCUUCUGCUAAUCUUGCU |
| | | GCUACUAAAAUGUCAGAGUGUGUACUUGGACAAUCAAAAAGAGUUGAUUUUUGUGGAAAGGGCUAUCAUCUUAUG |
| | | UCCUUCCCUCAGUCAGCACCUCAUGGUGUAGUCUUCUUGCAUGUGACUUAUGUCCCUGCACAAGAAAAGAACUUC |
| | | ACAACUGCUCCUGCCAUUUGUCAUGAUGGAAAAGCACACUUUCCUCGUGAAGGUGUCUUUGUUUCAAAUGGCACA |
| | | CACUGGUUUGUAACACAAAGGAAUUUUUAUGAACCACAAAUCAUUACUACAGACAACACAUUUGUGUCUGGUAACU |
| | | GUGAUGUUGUAAUAGGAAUUGUCAACAACACAGUUUAUGAUCCUUUGCAACCUGAAUUAGACUCAUUCAAGGAGG |
| | | AGUUAGAUAAAUAUUUUAAGAAUCAUACAUCACCAGAUGUUGAUUUAGGUGACAUCUCUGGCAUUAAUGCUUCAGU |
| | | UGUAAACAUUCAAAAAGAAAUUGACCGCCUCAAUGAGGUUGCCAAGAAUUUAAAUGAAUCUCUCAUCGAUCUCCAA |
| | | GAACUUGGAAAGUAUGAGCAGGGGUAUAUCCCUGAAGCCCCCAGGGACGGCCAGGCUUACGUCAGAAAGGAUGG |
| | | AGAGUGGGUGCUCUUGAGCACCUUCCUG |
| 162 | P55 | AUGGGAGUCAAAGUUCUGUUUGCCCUGAUCUGCAUCGCUGUGGCCGAGGCCAAGGUUAAUCUUACAACCAGAACU |
| | | CAAUUACCCCCUGCAUACACUAAUUCUUUCACACGUGGUGUUUAUUACCCUGACAAAGUUUUCAGAUCCUCAGUU |
| | | UUACAUUCAACUCAGGAUUUGUUCUUACCUUUCUUUUCCAAUGUUACUUGGUUCCAUGCUAUACAUGUCUCUGGG |
| | | ACCAAUGGUACUAAGAGGUUUGAUAACCCUGUCCUACCAUUUAAUGAUGGUGUUUAUUUUGCUUCCACUGAGAAG |
| | | UCUAACAUAAUAAGAGGCUGGAUCUUUGGUACUACUUUAGAUUCGAAGACCCAGUCCCUACUUAUUGUUAAUAAC |
| | | GCUACUAAUGUUGUUAUUAAAGUCUGUGAAUUUCAAUUUUGUAAUGAUCCAUUUUUGGGUGUUUAUUACCACAAA |
| | | AACAACAAAAGUUGGAUGGAAAGUGAGUUCAGAGUUUAUUCUAGUGCGAAUAAUUGCACUUUUGAAUAUGUCUCU |
| | | CAGCCUUUUCUUAUGGACCUUGAAGGAAAACAGGGUAAUUUCAAAAAUCUUAGGGAAUUUGUGUUUAAGAAUAUU |
| | | GAUGGUUAUUUUAAAAUAUAUUCUAAGCACACGCCUAUUAAUUUAGUGCGUGAUCUCCCUCAGGGUUUUUCGGCU |
| | | UUAGAACCAUUGGUAGAUUUGCCAAUAGGUAUUAACAUCACUAGGUUUCAAACUUUACUUGCUUUACAUAGAAGUU |
| | | AUUUGACUCCUGGUGAUUCUUCUUCAGGUUGGACAGCUGGUGCUGCAGCUUAUUAUGUGGGUUAUCUUCAACCU |
| | | AGGACUUUUCUAUUAAAAUAUAAUGAAAAUGGAACCAUUACAGAUGCUGUAGACUGUGCACUUGACCCUCUCUCAG |
| | | AAACAAAGUGUACGUUGAAAUCCUUCACUGUAGAAAAAGGAAUCUAUCAAACUUCUAACUUUAGAGUCCAACCAAC |
| | | AGAAUCUAUUGUUAGAUUUCCUAAUAUUACAAACUUGUGCCCUUUUGGUGAAGUUUUUAACGCCACCAGAUUUGC |
| | | AUCCGUGUAUGCUUGGAACAGGAAGAGAAUCAGCAACUGUGUUGCUGAUUAUUCUGUCCUAUAUAAUUCCGCAUC |
| | | AUUUUCCACUUUUAAGUGUUAUGGAGUGUCUCCUACUAAAUUAAAUGAUCUCUGCUUUACUAAUGUCUAUGCAGA |
| | | UUCAUUUGUAAUUAGAGGUGAUGAAGUCAGACAAAUCGCUCCAGGGCAAACUGGAAAGAUUGCUGAUUAUAAUUA |
| | | UAAAUUACCAGAUGAUUUUACAGGCUGCGUUAUAGCUUGGAAUUCUAACAAUCUUGAUUCUAAGGUUGGUGGUAA |
| | | UUAUAAUUACCUGUAUAGAUUGUUUAGGAAGUCUAAUCUCAAACCUUUUGAGAGAGAUAUUUCAACUGAAAUCUAU |
| | | CAGGCCGGUAGCACACCUUGUAAUGGUGUUGAAGGUUUUAAUUGUUACUUUCCUUUACAAUCAUAUGGUUUCCAA |
| | | CCCACUAAUGGUGUUGGUUACCAACCAUACAGAGUAGUAGUACUUUCUUUUGAACUUCUACAUGCACCAGCAACU |
| | | GUUUGUGGACCUAAAAAGUCUACUAAUUUGGUUAAAAACAAAUGUGUCAAUUUCAACUUCAAUGGUUUAACAGGCA |
| | | CAGGUGUUCUUACUGAGUCUAACAAAAAGUUUCUGCCUUUCCAACAAUUUGGCAGAGACAUUGCUGACACUACUG |
| | | AUGCUGUCCGUGAUCCACAGACACUUGAGAUUCUUGACAUUACACCAUGUUCUUUUGGUGGUGUCAGUGUUAUAA |
| | | CACCAGGAACAAAUACUUCUAACCAGGUUGCUGUUCUUUAUCAGGAUGUUAACUGCACAGAAGUCCCUGUUGCUA |
| | | UUCAUGCAGAUCAACUUACUCCUACUUGGCGUGUUUAUUCUACAGGUUCUAAUGUUUUUCAAACACGUGCAGGCU |
| | | GUUUAAUAGGGGCUGAACAUGUCAACAACUCAUAUGAGUGUGACAUACCCAUUGGUGCAGGUAUAUGCGCUAGUU |
| | | AUCAGACUCAGACUAAUUCUCCUGGCAGCGCCAGCAGUGUAGCUAGUCAAUCCAUCAUUGCCUACACUAUGUCAC |
| | | UUGGUGCAGAAAAUUCAGUUGCUUACUCUAAUAACUCUAUUGCCAUACCCACAAAUUUUACUAUUAGUGUUACCAC |
| | | AGAAAUUCUACCAGUGUCUAUGACCAAGACAUCAGUAGAUUGUACAAUGUACAUUUGUGGUGAUUCAACUGAAUG |
| | | CAGCAAUCUUUUGUUGCAAUAUGGCAGUUUUUGUACACAAUUAAACCGUGCUUUAACUGGGAUAGCUGUUGAACA |
| | | AGACAAAAACACCCAAGAAGUUUUUGCACAAGUCAAACAAAUUUACAAAACACCACCAAUUAAAGAUUUUGGUGGU |
| | | UUUAAUUUUUCACAAAUAUUACCAGAUCCAUCAAAACCAAGCAAGAGGUCAUUUAUUGAAGAUCUACUUUUCAACA |
| | | AAGUGACACUUGCAGAUGCUGGCUUCAUCAAACAAUAUGGUGAUUGCCUUGGUGAUAUUGCUGCUAGGGACCUCA |
| | | UUUGUGCACAAAAGUUUAACGGCCUUACUGUUUUGCCACCUUUGCUCACAGAUGAAAUGAUUGCUCAAUACACUU |
| | | CUGCACUGUUAGCGGGUACAAUCACUUCUGGUUGGACCUUUGGUGCAGGUGCUGCAUUACAAAUACCAUUUGCU |
| | | AUGCAAAUGGCUUAUAGGUUUAAUGGUAUUGGAGUUACACAGAAUGUUCUCUAUGAGAACCAAAAAUUGAUUGCC |
| | | AACCAAUUUAAUAGUGCCAUUGGCAAAAUUCAAGACUCACUUUCUUCCACAGCAAGUGCACUUGGAAAACUUCAAG |
| | | AUGUGGUCAACCAAAAUGCACAAGCUUUAAACACGCUUGUUAAACAACUUAGCUCCAAUUUUGGUGCAAUUUCAAG |
| | | UGUUUUAAAUGAUAUCCUUUCACGUCUUGACCCUCCCGAGGCUGAAGUGCAAAUUGAUAGGUUGAUCACAGGCAG |
| | | ACUUCAAAGUUUGCAGACAUAUGUGACUCAACAAUUAAUUAGAGCUGCAGAAAUCAGAGCUUCUGCUAAUCUUGCU |
| | | GCUACUAAAAUGUCAGAGUGUGUACUUGGACAAUCAAAAAGAGUUGAUUUUUGUGGAAAGGGCUAUCAUCUUAUG |
| | | UCCUUCCCUCAGUCAGCACCUCAUGGUGUAGUCUUCUUGCAUGUGACUUAUGUCCCUGCACAAGAAAAGAACUUC |
| | | ACAACUGCUCCUGCCAUUUGUCAUGAUGGAAAAGCACACUUUCCUCGUGAAGGUGUCUUUGUUUCAAAUGGCACA |
| | | CACUGGUUUGUAACACAAAGGAAUUUUUAUGAACCACAAAUCAUUACUACAGACAACACAUUUGUGUCUGGUAACU |
| | | GUGAUGUUGUAAUAGGAAUUGUCAACAACACAGUUUAUGAUCCUUUGCAACCUGAAUUAGACUCAUUCAAGGAGG |
| | | AGUUAGAUAAAUAUUUUAAGAAUCAUACAUCACCAGAUGUUGAUUUAGGUGACAUCUCUGGCAUUAAUGCUUCAGU |
| | | UGUAAACAUUCAAAAAGAAAUUGACCGCCUCAAUGAGGUUGCCAAGAAUUUAAAUGAAUCUCUCAUCGAUCUCCAA |
| | | GAACUUGGAAAGUAUGAGCAGUAUAUAAAAUGGCCAUGGUACAUUUGGCUAGGUUUUAUAGCUGGCUUGAUUGCC |
| | | AUAGUAAUGGUGACAAUUAUGCUUUGCUGUAUGACCAGUUGCUGUAGUUGUCUCAAGGGCUGUUGUUCUUGUGG |
| | | AUCCUGCUGCAAAUUUGAUGAAGACGACUCUGAGCCAGUGCUCAAAGGAGUCAAAUUACAUUACACA |
| 163 | P57 | AUGGGAGUCAAAGUUCUGUUUGCCCUGAUCUGCAUCGCUGUGGCCGAGGCCAAGAGAGUCCAACCAACAGAAUCU |
| | | AUUGUUAGAUUUCCUAAUAUUACAAACUUGUGCCCUUUUGGUGAAGUUUUUAACGCCACCAGAUUUGCAUCCGUG |
| | | UAUGCUUGGAACAGGAAGAGAAUCAGCAACUGUGUUGCUGAUUAUUCUGUCCUAUAUAAUUCCGCAUCAUUUUCC |
| | | ACUUUUAAGUGUUAUGGAGUGUCUCCUACUAAAUUAAAUGAUCUCUGCUUUACUAAUGUCUAUGCAGAUUCAUUU |
| | | GUAAUUAGAGGUGAUGAAGUCAGACAAAUCGCUCCAGGGCAAACUGGAAAGAUUGCUGAUUAUAAUUAUAAAUUAC |
| | | CAGAUGAUUUUACAGGCUGCGUUAUAGCUUGGAAUUCUAACAAUCUUGAUUCUAAGGUUGGUGGUAAUUAUAAUU |
| | | ACCUGUAUAGAUUGUUUAGGAAGUCUAAUCUCAAACCUUUUGAGAGAGAUAUUUCAACUGAAAUCUAUCAGGCCG |
| | | GUAGCACACCUUGUAAUGGUGUUGAAGGUUUUAAUUGUUACUUUCCUUUACAAUCAUAUGGUUUCCAACCCACUA |
| | | AUGGUGUUGGUUACCAACCAUACAGAGUAGUAGUACUUUCUUUUGAACUUCUACAUGCACCAGCAACUGUUUGUG |
| | | GACCUAAAAAGUCUACUAAUUUGGUUAAAAACAAAUGUGUCAAUUUCGGGUAUAUCCCUGAAGCCCCCAGGGACG |
| | | GCCAGGCUUACGUCAGAAAGGAUGGAGAGUGGGUGCUCUUGAGCACCUUCCUGUAA |
| 164 | P58 | AUGUUUGUUUUUCUUGUUUUAUUGCCACUAGUCUCUAGUCAGUGUGUUAAUCUUACAACCAGAACUCAAUUACCC |
| | | CCUGCAUACACUAAUUCUUUCACACGUGGUGUUUAUUACCCUGACAAAGUUUUCAGAUCCUCAGUUUUACAUUCA |
| | | ACUCAGGAUUUGUUCUUACCUUUCUUUUCCAAUGUUACUUGGUUCCAUGCUAUACAUGUCUCUGGGACCAAUGGU |
| | | ACUAAGAGGUUUGAUAACCCUGUCCUACCAUUUAAUGAUGGUGUUUAUUUUGCUUCCACUGAGAAGUCUAACAUA |
| | | AUAAGAGGCUGGAUCUUUGGUACUACUUUAGAUUCGAAGACCCAGUCCCUACUUAUUGUUAAUAACGCUACUAAU |
| | | GUUGUUAUUAAAGUCUGUGAAUUUCAAUUUUGUAAUGAUCCAUUUUUGGGUGUUUAUUACCACAAAAACAACAAAA |
| | | GUUGGAUGGAAAGUGAGUUCAGAGUUUAUUCUAGUGCGAAUAAUUGCACUUUUGAAUAUGUCUCUCAGCCUUUUC |
| | | UUAUGGACCUUGAAGGAAAACAGGGUAAUUUCAAAAAUCUUAGGGAAUUUGUGUUUAAGAAUAUUGAUGGUUAUU |
| | | UUAAAAUAUAUUCUAAGCACACGCCUAUUAAUUUAGUGCGUGAUCUCCCUCAGGGUUUUUCGGCUUUAGAACCAU |
| | | UGGUAGAUUUGCCAAUAGGUAUUAACAUCACUAGGUUUCAAACUUUACUUGCUUUACAUAGAAGUUAUUUGACUC |
| | | CUGGUGAUUCUUCUUCAGGUUGGACAGCUGGUGCUGCAGCUUAUUAUGUGGGUUAUCUUCAACCUAGGACUUUU |
| | | CUAUUAAAAUAUAAUGAAAAUGGAACCAUUACAGAUGCUGUAGACUGUGCACUUGACCCUCUCUCAGAAACAAAGU |
| | | GUACGUUGAAAUCCUUCACUGUAGAAAAAGGAAUCUAUCAAACUUCUAACUUUAGAGUCCAACCAACAGAAUCUAU |
| | | UGUUAGAUUUCCUAAUAUUACAAACUUGUGCCCUUUUGGUGAAGUUUUUAACGCCACCAGAUUUGCAUCCGUGUA |
| | | UGCUUGGAACAGGAAGAGAAUCAGCAACUGUGUUGCUGAUUAUUCUGUCCUAUAUAAUUCCGCAUCAUUUUCCAC |
| | | UUUUAAGUGUUAUGGAGUGUCUCCUACUAAAUUAAAUGAUCUCUGCUUUACUAAUGUCUAUGCAGAUUCAUUUGU |
| | | AAUUAGAGGUGAUGAAGUCAGACAAAUCGCUCCAGGGCAAACUGGAAAGAUUGCUGAUUAUAAUUAUAAAUUACCA |
| | | GAUGAUUUUACAGGCUGCGUUAUAGCUUGGAAUUCUAACAAUCUUGAUUCUAAGGUUGGUGGUAAUUAUAAUUAC |
| | | CUGUAUAGAUUGUUUAGGAAGUCUAAUCUCAAACCUUUUGAGAGAGAUAUUUCAACUGAAAUCUAUCAGGCCGGU |
| | | AGCACACCUUGUAAUGGUGUUGAAGGUUUUAAUUGUUACUUUCCUUUACAAUCAUAUGGUUUCCAACCCACUAAU |
| | | GGUGUUGGUUACCAACCAUACAGAGUAGUAGUACUUUCUUUUGAACUUCUACAUGCACCAGCAACUGUUUGUGGA |
| | | CCUAAAAAGUCUACUAAUUUGGUUAAAAACAAAUGUGUCAAUUUCAACUUCAAUGGUUUAACAGGCACAGGUGUUC |
| | | UUACUGAGUCUAACAAAAAGUUUCUGCCUUUCCAACAAUUUGGCAGAGACAUUGCUGACACUACUGAUGCUGUCC |
| | | GUGAUCCACAGACACUUGAGAUUCUUGACAUUACACCAUGUUCUUUUGGUGGUGUCAGUGUUAUAACACCAGGAA |
| | | CAAAUACUUCUAACCAGGUUGCUGUUCUUUAUCAGGGUGUUAACUGCACAGAAGUCCCUGUUGCUAUUCAUGCAG |
| | | AUCAACUUACUCCUACUUGGCGUGUUUAUUCUACAGGUUCUAAUGUUUUUCAAACACGUGCAGGCUGUUUAAUAG |
| | | GGGCUGAACAUGUCAACAACUCAUAUGAGUGUGACAUACCCAUUGGUGCAGGUAUAUGCGCUAGUUAUCAGACUC |
| | | AGACUAAUUCUCCUGGCAGCGCCAGCAGUGUAGCUAGUCAAUCCAUCAUUGCCUACACUAUGUCACUUGGUGCAG |
| | | AAAAUUCAGUUGCUUACUCUAAUAACUCUAUUGCCAUACCCACAAAUUUUACUAUUAGUGUUACCACAGAAAUUCU |
| | | ACCAGUGUCUAUGACCAAGACAUCAGUAGAUUGUACAAUGUACAUUUGUGGUGAUUCAACUGAAUGCAGCAAUCU |
| | | UUUGUUGCAAUAUGGCAGUUUUUGUACACAAUUAAACCGUGCUUUAACUGGGAUAGCUGUUGAACAAGACAAAAA |
| | | CACCCAAGAAGUUUUUGCACAAGUCAAACAAAUUUACAAAACACCACCAAUUAAAGAUUUUGGUGGUUUUAAUUUU |
| | | UCACAAAUAUUACCAGAUCCAUCAAAACCAAGCAAGAGGUCAUUUAUUGAAGAUCUACUUUUCAACAAAGUGACAC |
| | | UUGCAGAUGCUGGCUUCAUCAAACAAUAUGGUGAUUGCCUUGGUGAUAUUGCUGCUAGGGACCUCAUUUGUGCA |
| | | CAAAAGUUUAACGGCCUUACUGUUUUGCCACCUUUGCUCACAGAUGAAAUGAUUGCUCAAUACACUUCUGCACUG |
| | | UUAGCGGGUACAAUCACUUCUGGUUGGACCUUUGGUGCAGGUGCUGCAUUACAAAUACCAUUUGCUAUGCAAAUG |
| | | GCUUAUAGGUUUAAUGGUAUUGGAGUUACACAGAAUGUUCUCUAUGAGAACCAAAAAUUGAUUGCCAACCAAUUUA |
| | | AUAGUGCCAUUGGCAAAAUUCAAGACUCACUUUCUUCCACAGCAAGUGCACUUGGAAAACUUCAAGAUGUGGUCA |
| | | ACCAAAAUGCACAAGCUUUAAACACGCUUGUUAAACAACUUAGCUCCAAUUUUGGUGCAAUUUCAAGUGUUUUAAA |
| | | UGAUAUCCUUUCACGUCUUGACCCUCCCGAGGCUGAAGUGCAAAUUGAUAGGUUGAUCACAGGCAGACUUCAAAG |
| | | UUUGCAGACAUAUGUGACUCAACAAUUAAUUAGAGCUGCAGAAAUCAGAGCUUCUGCUAAUCUUGCUGCUACUAAA |
| | | AUGUCAGAGUGUGUACUUGGACAAUCAAAAAGAGUUGAUUUUUGUGGAAAGGGCUAUCAUCUUAUGUCCUUCCCU |
| | | CAGUCAGCACCUCAUGGUGUAGUCUUCUUGCAUGUGACUUAUGUCCCUGCACAAGAAAAGAACUUCACAACUGCU |
| | | CCUGCCAUUUGUCAUGAUGGAAAAGCACACUUUCCUCGUGAAGGUGUCUUUGUUUCAAAUGGCACACACUGGUUU |
| | | GUAACACAAAGGAAUUUUUAUGAACCACAAAUCAUUACUACAGACAACACAUUUGUGUCUGGUAACUGUGAUGUUG |
| | | UAAUAGGAAUUGUCAACAACACAGUUUAUGAUCCUUUGCAACCUGAAUUAGACUCAUUCAAGGAGGAGUUAGAUAA |
| | | AUAUUUUAAGAAUCAUACAUCACCAGAUGUUGAUUUAGGUGACAUCUCUGGCAUUAAUGCUUCAGUUGUAAACAUU |
| | | CAAAAAGAAAUUGACCGCCUCAAUGAGGUUGCCAAGAAUUUAAAUGAAUCUCUCAUCGAUCUCCAAGAACUUGGAA |
| | | AGUAUGAGCAGUAUAUAAAAUGGCCAUGGUACAUUUGGCUAGGUUUUAUAGCUGGCUUGAUUGCCAUAGUAAUGG |
| | | UGACAAUUAUGCUUUGCUGUAUGACCAGUUGCUGUAGUUGUCUCAAGGGCUGUUGUUCUUGUGGAUCCUGCUGC |
| | | AAAUUUGAUGAAGACGACUCUGAGCCAGUGCUCAAAGGAGUCAAAUUACAUUACACA |
| 165 | 2A2361 | AUGGGAGUCAAAGUUCUGUUUGCCCUGAUCUGCAUUGCUGUGGCCGAGGCCAAGAGAGUCCAACCAACAGAAUCU |
| | | AUUGUUAGAUUUCCUAAUAUUACAAACUUGUGCCCUUUUGGUGAAGUUUUUAACGCCACCAGAUUUGCAUCCGUG |
| | | UAUGCUUGGAACAGGAAGAGAAUCAGCAACUGUGUUGCUGAUUAUUCUGUCCUAUAUAAUUCCGCAUCAUUUUCC |
| | | ACUUUUAAGUGUUAUGGAGUGUCUCCUACUAAAUUAAAUGAUCUCUGCUUUACUAAUGUCUAUGCAGAUUCAUUU |
| | | GUAAUUAGAGGUGAUGAAGUCAGACAAAUCGCUCCAGGGCAAACUGGAAAGAUUGCUGAUUAUAAUUAUAAAUUAC |
| | | CAGAUGAUUUUACAGGCUGCGUUAUAGCUUGGAAUUCUAACAAUCUUGAUUCUAAGGUUGGUGGUAAUUAUAAUU |
| | | ACCUGUAUAGAUUGUUUAGGAAGUCUAAUCUCAAACCUUUUGAGAGAGAUAUUUCAACUGAAAUCUAUCAGGCCG |
| | | GUAGCACACCUUGUAAUGGUGUUGAAGGUUUUAAUUGUUACUUUCCUUUACAAUCAUAUGGUUUCCAACCCACUA |
| | | AUGGUGUUGGUUACCAACCAUACAGAGUAGUAGUACUUUCUUUUGAACUUCUACAUGCACCAGCAACUGUUUGUG |
| | | GACCUAAAAAGUCUACUAAUUUGGUUAAAAACAAAUGUGUCAAUUUCGGAGGAGGAGGAAGCGGAUACAUCCCCG |
| | | AGGCCCCCCGGGACGGCCAGGCCUACGUGCGGAAGGACGGCGAGUGGGUGCUGCUCAGCACCUUCCUG |
| 166 | 2A3361 | AUGGGAGUCAAAGUUCUGUUUGCCCUGAUCUGCAUUGCUGUGGCCGAGGCCAAGAGAGUCCAACCAACAGAAUCU |
| | | AUUGUUAGAUUUCCUAAUAUUACAAACUUGUGCCCUUUUGGUGAAGUUUUUAACGCCACCAGAUUUGCAUCCGUG |
| | | UAUGCUUGGAACAGGAAGAGAAUCAGCAACUGUGUUGCUGAUUAUUCUGUCCUAUAUAAUUCCGCAUCAUUUUCC |
| | | ACUUUUAAGUGUUAUGGAGUGUCUCCUACUAAAUUAAAUGAUCUCUGCUUUACUAAUGUCUAUGCAGAUUCAUUU |
| | | GUAAUUAGAGGUGAUGAAGUCAGACAAAUCGCUCCAGGGCAAACUGGAAAGAUUGCUGAUUAUAAUUAUAAAUUAC |
| | | CAGAUGAUUUUACAGGCUGCGUUAUAGCUUGGAAUUCUAACAAUCUUGAUUCUAAGGUUGGUGGUAAUUAUAAUU |
| | | ACCUGUAUAGAUUGUUUAGGAAGUCUAAUCUCAAACCUUUUGAGAGAGAUAUUUCAACUGAAAUCUAUCAGGCCG |
| | | GUAGCACACCUUGUAAUGGUGUUGAAGGUUUUAAUUGUUACUUUCCUUUACAAUCAUAUGGUUUCCAACCCACUA |
| | | AUGGUGUUGGUUACCAACCAUACAGAGUAGUAGUACUUUCUUUUGAACUUCUACAUGCACCAGCAACUGUUUGUG |
| | | GACCUAAAAAGUCUACUAAUUUGGUUAAAAACAAAUGUGUCAAUUUCGGAGGAGGAGGAAGCGGAUACAUCCCCG |
| | | AGGCCCCCCGGGACGGCCAGGCCUACGUGCGGAAGGACGGCGAGUGGGUGCUGCUCAGCACCUUCCUGGGAGG |
| | | AGGAGGAAGCAGAGUCCAACCAACAGAAUCUAUUGUUAGAUUUCCUAAUAUUACAAACUUGUGCCCUUUUGGUGA |
| | | AGUUUUUAACGCCACCAGAUUUGCAUCCGUGUAUGCUUGGAACAGGAAGAGAAUCAGCAACUGUGUUGCUGAUUA |
| | | UUCUGUCCUAUAUAAUUCCGCAUCAUUUUCCACUUUUAAGUGUUAUGGAGUGUCUCCUACUAAAUUAAAUGAUCU |
| | | CUGCUUUACUAAUGUCUAUGCAGAUUCAUUUGUAAUUAGAGGUGAUGAAGUCAGACAAAUCGCUCCAGGGCAAAC |
| | | UGGAAAGAUUGCUGAUUAUAAUUAUAAAUUACCAGAUGAUUUUACAGGCUGCGUUAUAGCUUGGAAUUCUAACAAU |
| | | CUUGAUUCUAAGGUUGGUGGUAAUUAUAAUUACCUGUAUAGAUUGUUUAGGAAGUCUAAUCUCAAACCUUUUGAG |
| | | AGAGAUAUUUCAACUGAAAUCUAUCAGGCCGGUAGCACACCUUGUAAUGGUGUUGAAGGUUUUAAUUGUUACUUU |
| | | CCUUUACAAUCAUAUGGUUUCCAACCCACUAAUGGUGUUGGUUACCAACCAUACAGAGUAGUAGUACUUUUUUU |
| | | GAACUUCUACAUGCACCAGCAACUGUUUGUGGACCUAAAAAGUCUACUAAUUUGGUUAAAAACAAAUGUGUCAAUU |
| | | UC |
| 167 | 2A6361 | AUGGGAGUCAAAGUUCUGUUUGCCCUGAUCUGCAUUGCUGUGGCCGAGGCCAAGAGAGUCCAACCAACAGAAUCU |
| | | AUUGUUAGAUUUCCUAAUAUUACAAACUUGUGCCCUUUUGGUGAAGUUUUUAACGCCACCAGAUUUGCAUCCGUG |
| | | UAUGCUUGGAACAGGAAGAGAAUCAGCAACUGUGUUGCUGAUUAUUCUGUCCUAUAUAAUUCCGCAUCAUUUUCC |
| | | ACUUUUAAGUGUUAUGGAGUGUCUCCUACUAAAUUAAAUGAUCUCUGCUUUACUAAUGUCUAUGCAGAUUCAUUU |
| | | GUAAUUAGAGGUGAUGAAGUCAGACAAAUCGCUCCAGGGCAAACUGGAAAGAUUGCUGAUUAUAAUUAUAAAUUAC |
| | | CAGAUGAUUUUACAGGCUGCGUUAUAGCUUGGAAUUCUAACAAUCUUGAUUCUAAGGUUGGUGGUAAUUAUAAUU |
| | | ACCUGUAUAGAUUGUUUAGGAAGUCUAAUCUCAAACCUUUUGAGAGAGAUAUUUCAACUGAAAUCUAUCAGGCCG |
| | | GUAGCACACCUUGUAAUGGUGUUGAAGGUUUUAAUUGUUACUUUCCUUUACAAUCAUAUGGUUUCCAACCCACUA |
| | | AUGGUGUUGGUUACCAACCAUACAGAGUAGUAGUACUUUCUUUUGAACUUCUACAUGCACCAGCAACUGUUUGUG |
| | | GACCUAAAAAGUCUACUAAUUUGGUUAAAAACAAAUGUGUCAAUUUCGACAUCAUUAAGCUGCUCAACGAGCAGGU |
| | | GAACAAGGAGAUGAACAGCUCCAACCUGUACAUGAGCAUGAGCAGCUGGUGCUACACCCACAGCCUGGACGGCGC |
| | | CGGCCUGUUCCUGUUUGACCACGCCGCUGAGGAAUACGAGCACGCCAAGAAACUGAUCGUGUUCCUGAACGAGAA |
| | | CAACGUGCCCGUGCAGCUGACCAGCAUCAGCGCCCCCGAGCACAAGUUCGAGAGCCUGACCCAGAUCUUCCAGAA |
| | | GGCCUACGAGCACGAGCAGCACAUCAGCGAGAGCAUCAACAACAUCGUCGACCACGCCAUCAAGGGCAAGGACCA |
| | | CGCCACCUUCAACUUCCUGCAGUGGUACGUGAGCGAGCAGCACGAGGAGGAGGUGCUGUUCAAGGACAUCCUGG |
| | | ACAAGAUCGAGCUGAUCGGCAACGAGAACCACGGCCUGUACCUGGCCGACCAGUACGUGAAGGGCAUCGCCAAGA |
| | | GCCGCAAAAGU |
| 168 | 2A7361 | AUGGGAGUCAAAGUUCUGUUUGCCCUGAUCUGCAUUGCUGUGGCCGAGGCCAAGAGAGUCCAACCAACAGAAUCU |
| | | AUUGUUAGAUUUCCUAAUAUUACAAACUUGUGCCCUUUUGGUGAAGUUUUUAACGCCACCAGAUUUGCAUCCGUG |
| | | UAUGCUUGGAACAGGAAGAGAAUCAGCAACUGUGUUGCUGAUUAUUCUGUCCUAUAUAAUUCCGCAUCAUUUUCC |
| | | ACUUUUAAGUGUUAUGGAGUGUCUCCUACUAAAUUAAAUGAUCUCUGCUUUACUAAUGUCUAUGCAGAUUCAUUU |
| | | GUAAUUAGAGGUGAUGAAGUCAGACAAAUCGCUCCAGGGCAAACUGGAAAGAUUGCUGAUUAUAAUUAUAAAUUAC |
| | | CAGAUGAUUUUACAGGCUGCGUUAUAGCUUGGAAUUCUAACAAUCUUGAUUCUAAGGUUGGUGGUAAUUAUAAUU |
| | | ACCUGUAUAGAUUGUUUAGGAAGUCUAAUCUCAAACCUUUUGAGAGAGAUAUUUCAACUGAAAUCUAUCAGGCCG |
| | | GUAGCACACCUUGUAAUGGUGUUGAAGGUUUUAAUUGUUACUUUCCUUUACAAUCAUAUGGUUUCCAACCCACUA |
| | | AUGGUGUUGGUUACCAACCAUACAGAGUAGUAGUACUUUCUUUUGAACUUCUACAUGCACCAGCAACUGUUUGUG |
| | | GACCUAAAAAGUCUACUAAUUUGGUUAAAAACAAAUGUGUCAAUUUCGGAGGAGGAGGAAGCGACAUCAUUAAGCU |
| | | GCUCAACGAGCAGGUGAACAAGGAGAUGAACAGCUCCAACCUGUACAUGAGCAUGAGCAGCUGGUGCUACACCCA |
| | | CAGCCUGGACGGCGCCGGCCUGUUCCUGUUUGACCACGCCGCUGAGGAAUACGAGCACGCCAAGAAACUGAUCG |
| | | UGUUCCUGAACGAGAACAACGUGCCCGUGCAGCUGACCAGCAUCAGCGCCCCCGAGCACAAGUUCGAGAGCCUGA |
| | | CCCAGAUCUUCCAGAAGGCCUACGAGCACGAGCAGCACAUCAGCGAGAGCAUCAACAACAUCGUCGACCACGCCA |
| | | UCAAGGGCAAGGACCACGCCACCUUCAACUUCCUGCAGUGGUACGUGAGCGAGCAGCACGAGGAGGAGGUGCUG |
| | | UUCAAGGACAUCCUGGACAAGAUCGAGCUGAUCGGCAACGAGAACCACGGCCUGUACCUGGCCGACCAGUACGUG |
| | | AAGGGCAUCGCCAAGAGCCGCAAAAGU |
| 169 | 2A8361 | AUGGGAGUCAAAGUUCUGUUUGCCCUGAUCUGCAUUGCUGUGGCCGAGGCCAAGAGAGUCCAACCAACAGAAUCU |
| | | AUUGUUAGAUUUCCUAAUAUUACAAACUUGUGCCCUUUUGGUGAAGUUUUUAACGCCACCAGAUUUGCAUCCGUG |
| | | UAUGCUUGGAACAGGAAGAGAAUCAGCAACUGUGUUGCUGAUUAUUCUGUCCUAUAUAAUUCCGCAUCAUUUUCC |
| | | ACUUUUAAGUGUUAUGGAGUGUCUCCUACUAAAUUAAAUGAUCUCUGCUUUACUAAUGUCUAUGCAGAUUCAUUU |
| | | GUAAUUAGAGGUGAUGAAGUCAGACAAAUCGCUCCAGGGCAAACUGGAAAGAUUGCUGAUUAUAAUUAUAAAUUAC |
| | | CAGAUGAUUUUACAGGCUGCGUUAUAGCUUGGAAUUCUAACAAUCUUGAUUCUAAGGUUGGUGGUAAUUAUAAUU |
| | | ACCUGUAUAGAUUGUUUAGGAAGUCUAAUCUCAAACCUUUUGAGAGAGAUAUUUCAACUGAAAUCUAUCAGGCCG |
| | | GUAGCACACCUUGUAAUGGUGUUGAAGGUUUUAAUUGUUACUUUCCUUUACAAUCAUAUGGUUUCCAACCCACUA |
| | | AUGGUGUUGGUUACCAACCAUACAGAGUAGUAGUACUUUCUUUUGAACUUCUACAUGCACCAGCAACUGUUUGUG |
| | | GACCUAAAAAGUCUACUAAUUUGGUUAAAAACAAAUGUGUCAAUUUCCCCGGCAGCGGCUACAUCCCCGAGGCCC |
| | | CCCGGGACGGCCAGGCCUACGUGCGGAAGGACGGCGAGUGGGUGCUGCUCAGCACCUUCCUGAGCGGCCGGAG |
| | | CGGCGGAGACAUCAUUAAGCUGCUGAACGAGCAGGUGAACAAGGAGAUGAACAGCUCCAACCUGUACAUGAGCAU |
| | | GAGCAGCUGGUGCUACACCCACAGCCUGGACGGCGCCGGCCUGUUCCUGUUUGACCACGCCGCUGAGGAAUACG |
| | | AGCACGCCAAGAAACUGAUCGUGUUCCUGAACGAGAACAACGUGCCCGUGCAGCUGACCAGCAUCAGCGCCCCCG |
| | | AGCACAAGUUCGAGAGCCUGACCCAGAUCUUCCAGAAGGCCUACGAGCACGAGCAGCACAUCAGCGAGAGCAUCA |
| | | ACAACAUCGUCGACCACGCCAUCAAGGGCAAGGACCACGCCACCUUCAACUUCCUGCAGUGGUACGUGAGCGAGC |
| | | AGCACGAGGAGGAGGUGCUGUUCAAGGACAUCCUGGACAAGAUCGAGCUGAUCGGCAACGAGAACCACGGCCUG |
| | | UACCUGGCCGACCAGUACGUGAAGGGCAUCGCCAAGAGCCGCAAAAGU |
| 170 | 2A9361 | AUGGGAGUCAAAGUUCUGUUUGCCCUGAUCUGCAUUGCUGUGGCCGAGGCCAAGAGAGUCCAACCAACAGAAUCU |
| | | AUUGUUAGAUUUCCUAAUAUUACAAACUUGUGCCCUUUUGGUGAAGUUUUUAACGCCACCAGAUUUGCAUCCGUG |
| | | UAUGCUUGGAACAGGAAGAGAAUCAGCAACUGUGUUGCUGAUUAUUCUGUCCUAUAUAAUUCCGCAUCAUUUUCC |
| | | ACUUUUAAGUGUUAUGGAGUGUCUCCUACUAAAUUAAAUGAUCUCUGCUUUACUAAUGUCUAUGCAGAUUCAUUU |
| | | GUAAUUAGAGGUGAUGAAGUCAGACAAAUCGCUCCAGGGCAAACUGGAAAGAUUGCUGAUUAUAAUUAUAAAUUAC |
| | | CAGAUGAUUUUACAGGCUGCGUUAUAGCUUGGAAUUCUAACAAUCUUGAUUCUAAGGUUGGUGGUAAUUAUAAUU |
| | | ACCUGUAUAGAUUGUUUAGGAAGUCUAAUCUCAAACCUUUUGAGAGAGAUAUUUCAACUGAAAUCUAUCAGGCCG |
| | | GUAGCACACCUUGUAAUGGUGUUGAAGGUUUUAAUUGUUACUUUCCUUUACAAUCAUAUGGUUUCCAACCCACUA |
| | | AUGGUGUUGGUUACCAACCAUACAGAGUAGUAGUACUUUCUUUUGAACUUCUACAUGCACCAGCAACUGUUUGUG |
| | | GACCUAAAAAGUCUACUAAUUUGGUUAAAAACAAAUGUGUCAAUUUCAUCAACCACGUGGGCGGAACCGGCGGCG |
| | | CCAUCAUGGCCCCCGUGGCCGUGACCCGGCAGCUGGUGGGCAGC |
| 171 | 2A0461 | AUGGGAGUCAAAGUUCUGUUUGCCCUGAUCUGCAUUGCUGUGGCCGAGGCCAAGAGAGUCCAACCAACAGAAUCU |
| | | AUUGUUAGAUUUCCUAAUAUUACAAACUUGUGCCCUUUUGGUGAAGUUUUUAACGCCACCAGAUUUGCAUCCGUG |
| | | UAUGCUUGGAACAGGAAGAGAAUCAGCAACUGUGUUGCUGAUUAUUCUGUCCUAUAUAAUUCCGCAUCAUUUUCC |
| | | ACUUUUAAGUGUUAUGGAGUGUCUCCUACUAAAUUAAAUGAUCUCUGCUUUACUAAUGUCUAUGCAGAUUCAUUU |
| | | GUAAUUAGAGGUGAUGAAGUCAGACAAAUCGCUCCAGGGCAAACUGGAAAGAUUGCUGAUUAUAAUUAUAAAUUAC |
| | | CAGAUGAUUUUACAGGCUGCGUUAUAGCUUGGAAUUCUAACAAUCUUGAUUCUAAGGUUGGUGGUAAUUAUAAUU |
| | | ACCUGUAUAGAUUGUUUAGGAAGUCUAAUCUCAAACCUUUUGAGAGAGAUAUUUCAACUGAAAUCUAUCAGGCCG |
| | | GUAGCACACCUUGUAAUGGUGUUGAAGGUUUUAAUUGUUACUUUCCUUUACAAUCAUAUGGUUUCCAACCCACUA |
| | | AUGGUGUUGGUUACCAACCAUACAGAGUAGUAGUACUUUCUUUUGAACUUCUACAUGCACCAGCAACUGUUUGUG |
| | | GACCUAAAAAGUCUACUAAUUUGGUUAAAAACAAAUGUGUCAAUUUCGGAGGAGGAGGAAGCAUCAACCACGUGG |
| | | GCGGAACCGGCGGCGCCAUCAUGGCCCCCGUGGCCGUGACCCGGCAGCUGGUGGGCAGC |
| 172 | 2A1461 | AUGGGAGUCAAAGUUCUGUUUGCCCUGAUCUGCAUUGCUGUGGCCGAGGCCAAGAUCAACCACGUGGGGGAAC |
| | | CGGCGGCGCCAUCAUGGCCCCCGUGGCCGUGACCCGGCAGCUGGUGGGCAGCAGAGUCCAACCAACAGAAUCUA |
| | | UUGUUAGAUUUCCUAAUAUUACAAACUUGUGCCCUUUUGGUGAAGUUUUUAACGCCACCAGAUUUGCAUCCGUGU |
| | | AUGCUUGGAACAGGAAGAGAAUCAGCAACUGUGUUGCUGAUUAUUCUGUCCUAUAUAAUUCCGCAUCAUUUUCCA |
| | | CUUUUAAGUGUUAUGGAGUGUCUCCUACUAAAUUAAAUGAUCUCUGCUUUACUAAUGUCUAUGCAGAUUCAUUUG |
| | | UAAUUAGAGGUGAUGAAGUCAGACAAAUCGCUCCAGGGCAAACUGGAAAGAUUGCUGAUUAUAAUUAUAAAUUACC |
| | | AGAUGAUUUUACAGGCUGCGUUAUAGCUUGGAAUUCUAACAAUCUUGAUUCUAAGGUUGGUGGUAAUUAUAAUUA |
| | | CCUGUAUAGAUUGUUUAGGAAGUCUAAUCUCAAACCUUUUGAGAGAGAUAUUUCAACUGAAAUCUAUCAGGCCGG |
| | | UAGCACACCUUGUAAUGGUGUUGAAGGUUUUAAUUGUUACUUUCCUUUACAAUCAUAUGGUUUCCAACCCACUAA |
| | | UGGUGUUGGUUACCAACCAUACAGAGUAGUAGUACUUUCUUUUGAACUUCUACAUGCACCAGCAACUGUUUGUGG |
| | | ACCUAAAAAGUCUACUAAUUUGGUUAAAAACAAAUGUGUCAAUUUC |
| 173 | 2A2461 | AUGGGAGUCAAAGUUCUGUUUGCCCUGAUCUGCAUUGCUGUGGCCGAGGCCAAGAUCAACCACGUGGGGGAAC |
| | | CGGCGGCGCCAUCAUGGCCCCCGUGGCCGUGACCCGGCAGCUGGUGGGCAGCGGAGGAGGAGGAAGCAGAGUC |
| | | CAACCAACAGAAUCUAUUGUUAGAUUUCCUAAUAUUACAAACUUGUGCCCUUUUGGUGAAGUUUUUAACGCCACCA |
| | | GAUUUGCAUCCGUGUAUGCUUGGAACAGGAAGAGAAUCAGCAACUGUGUUGCUGAUUAUUCUGUCCUAUAUAAUU |
| | | CCGCAUCAUUUUCCACUUUUAAGUGUUAUGGAGUGUCUCCUACUAAAUUAAAUGAUCUCUGCUUUACUAAUGUCU |
| | | AUGCAGAUUCAUUUGUAAUUAGAGGUGAUGAAGUCAGACAAAUCGCUCCAGGGCAAACUGGAAAGAUUGCUGAUU |
| | | AUAAUUAUAAAUUACCAGAUGAUUUUACAGGCUGCGUUAUAGCUUGGAAUUCUAACAAUCUUGAUUCUAAGGUUG |
| | | GUGGUAAUUAUAAUUACCUGUAUAGAUUGUUUAGGAAGUCUAAUCUCAAACCUUUUGAGAGAGAUAUUUCAACUG |
| | | AAAUCUAUCAGGCCGGUAGCACACCUUGUAAUGGUGUUGAAGGUUUUAAUUGUUACUUUCCUUUACAAUCAUAUG |
| | | GUUUCCAACCCACUAAUGGUGUUGGUUACCAACCAUACAGAGUAGUAGUACUUUCUUUUGAACUUCUACAUGCAC |
| | | CAGCAACUGUUUGUGGACCUAAAAAGUCUACUAAUUUGGUUAAAAACAAAUGUGUCAAUUUC |
| 174 | 2A7520 | AUGGGAGUCAAAGUUCUGUUUGCCCUGAUCUGCAUUGCUGUGGCCGAGGCCAAGAGAGUCCAACCAACAGAAUCU |
| | | AUUGUUAGAUUUCCUAAUAUUACAAACUUGUGCCCUUUUGGUGAAGUUUUUAACGCCACCAGAUUUGCAUCCGUG |
| | | UAUGCUUGGAACAGGAAGAGAAUCAGCAACUGUGUUGCUGAUUAUUCUGUCCUAUAUAAUUCCGCAUCAUUUUCC |
| | | ACUUUUAAGUGUUAUGGAGUGUCUCCUACUAAAUUAAAUGAUCUCUGCUUUACUAAUGUCUAUGCAGAUUCAUUU |
| | | GUAAUUAGAGGUGAUGAAGUCAGACAAAUCGCUCCAGGGCAAACUGGAAAGAUUGCUGAUUAUAAUUAUAAAUUAC |
| | | CAGAUGAUUUUACAGGCUGCGUUAUAGCUUGGAAUUCUAACAAUCUUGAUUCUAAGGUUGGUGGUAAUUAUAAUU |
| | | ACCUGUAUAGAUUGUUUAGGAAGUCUAAUCUCAAACCUUUUGAGAGAGAUAUUUCAACUGAAAUCUAUCAGGCCG |
| | | GUAGCACACCUUGUAAUGGUGUUGAAGGUUUUAAUUGUUACUUUCCUUUACAAUCAUAUGGUUUCCAACCCACUA |
| | | AUGGUGUUGGUUACCAACCAUACAGAGUAGUAGUACUUUCUUUUGAACUUCUACAUGCACCAGCAACUGUUUGUG |
| | | GACCUAAAAAGUCUACUAAUUUGGUUAAAAACAAAUGUGUCAAUUUCGGGUAUAUCCCUGAAGCCCCCAGGGACG |
| | | GCCAGGCUUACGUCAGAAAGGAUGGAGAGUGGGUGCUCUUGAGCACCUUCCUGUAA |
| 217 | IL-12 | atggctccccaaaagctgaccatcagctggttcgccatcgtgctgctcgtgagccccctgatggccatgtgggagctggagaaggacgtgtacgtggtcgaggtggactgga |
| | | cccccgacgcccccggcgaaacagtgaacctgacctgcgacacccccgaggaagacgatatcacctggacaagcgaccagcggcacggcgtgatcggcagcggca |
| | | agaccctgaccatcaccgtgaaggagttcctggacgccggccagtacacctgccacaagggcggagaaacactgagccacagccacctgctgttgcacaagaaagag |
| | | aacggcatctggagcaccgagatcctcaagaatttcaagaacaagaccttcctgaagtgcgaggcccccaactacagcggccggttcacctgcagctggctggtgcagcg |
| | | gaacatggacctgaagttcaacatcaagagctccagctctagccccgacagccgggccgtgacctgcggcatggccagcctgagcgccgagaaggtgaccctggacca |
| | | gcgggactacgagaagtacagcgtgagctgccaggaggacgtgacctgccctaccgctgaggaaacactgcccatcgagctggccctggaggcccggcagcaaaac |
| | | aagtacgagaactacagcaccagcttctttatccgggacatcattaagcccgacccccctaagaacctgcagatgaagcccctgaagaacagccaggtggaggtgagct |
| | | gggagtaccccgacagctggagcaccccccacagctacttcagcctgaagttcttcgtgcggatccagcggaagaaggagaagatgaaggaaacagaggagggctgc |
| | | aaccagaagggcgccttcctggtggaaaagacaagcacagaggtgcagtgcaagggcggcaacgtgtgcgtgcaggcccaggaccggtactataacagcagctgca |
| | | gcaagtgggcctgcgtgccctgccgggtgcggagtgtgcctggcgtcggcgtgcccggcgtgggccgggtgatccccgtgagcggccccgcccggtgcctgagccagag |
| | | ccggaacctgctgaagaccacagacgacatggtgaagaccgcccgggagaagctgaagcactacagctgcaccgccgaggacatcgaccacgaggacatcacccg |
| | | ggaccagaccagcaccctgaagacctgcctccccctggagctgcacaagaacgagagctgcctggccacccgggaaacaagctctaccacacggggcagctgcctgc |
| | | ctcctcagaagaccagcctgatgatgaccctgtgcctgggcagcatctacgaggacctgaagatgtaccagaccgagttccaggccatcaacgccgctctgcagaaccac |
| | | aaccaccagcagatcatcctggacaagggcatgctggtggccatcgacgagctgatgcagagcctgaaccacaacggcgaaacactgcggcagaagcccccagtgg |
| | | gcgaggccgacccctaccgggtgaagatgaagctgtgcatcctgctgcacgccttcagcacccgggtggtgaccatcaaccgggtgatgggctacctgagcagcgcc |
| 218 | IL12 | MCPQKLTISWFAIVLLVSPLMAMWELEKDVYVVEVDWTPDAPGETVNLTCDTPEEDDITWTSDQRHGVIGSGKTLTITVKEF |
| | | LDAGQYTCHKGGETLSHSHLLLHKKENGIWSTEILKNFKNKTFLKCEAPNYSGRFTCSWLVQRNMDLKFNIKSSSSSPDSR |
| | | AVTCGMASLSAEKVTLDQRDYEKYSVSCQEDVTCPTAEETLPIELALEARQQNKYENYSTSFFIRDIIKPDPPKNLQMKPLK |
| | | NSQVEVSWEYPDSWSTPHSYFSLKFFVRIQRKKEKMKETEEGCNQKGAFLVEKTSTEVQCKGGNVCVQAQDRYYNSSCS |
| | | KWACVPCRVRSVPGVGVPGVGRVIPVSGPARCLSQSRNLLKTTDDMVKTAREKLKHYSCTAEDIDHEDITRDQTSTLKTCL |
| | | PLELHKNESCLATRETSSTTRGSCLPPQKTSLMMTLCLGSIYEDLKMYQTEFQAINAALQNHNHQQIILDKGMLVAIDELMQ |
| | | SLNHNGETLRQKPPVGEADPYRVKMKLCILLHAFSTRVVTINRVMGYLSSA |
| 219 | P46 | ATGGGCGTGCACGAGTGCCCCGCCTGGCTGTGGCTGCTGCTGAGCCTGCTGAGCCTGCCCCTGGGCCTGCCCGTG |
| | | CTGGGCGCCagagtccaaccaacagaatctattgttagatttcctaatattacaaacttgtgcccttttggtgaagtttttaacgccaccagatttgcatccgtgtatgcttgg |
| | | aacaggaagagaatcagcaactgtgttgctgattattctgtcctatataattccgcatcattttccacttttaagtgttatggagtgtctcctactaaattaaatgatctctgctttactaa |
| | | tgtctatgcagattcatttgtaattagaggtgatgaagtcagacaaatcgctccagggcaaactggaaagattgctgattataattataaattaccagatgattttacaggctgcgt |
| | | tatagcttggaattctaacaatcttgattctaaggttggtggtaattataattacctgtatagattgtttaggaagtctaatctcaaaccttttgagagagatatttcaactgaaatctatc |
| | | aggccggtagcacaccttgtaatggtgttgaaggttttaattgttactttcctttacaatcatatggtttccaacccactaatggtgttggttaccaaccatacagagtagtagtactttc |
| | | ttttgaacttctacatgcaccagcaactgtttgtggacctaaaaagtctactaatttggttaaaaacaaatgtgtcaatttcTAA |
| 220 | p47 | ATGTACCGGATGCAGTTGTTGTCCTGTATAGCTCTTTCCCTTGCATTGGTCACTAATTCTagagtccaaccaacagaatctattgtta |
| | | gatttcctaatattacaaacttgtgcccttttggtgaagtttttaacgccaccagatttgcatccgtgtatgcttggaacaggaagagaatcagcaactgtgttgctgattattctgtcct |
| | | atataattccgcatcattttccacttttaagtgttatggagtgtctcctactaaattaaatgatctctgctttactaatgtctatgcagattcatttgtaattagaggtgatgaagtcagac |
| | | aaatcgctccagggcaaactggaaagattgctgattataattataaattaccagatgattttacaggctgcgttatagcttggaattctaacaatcttgattctaaggttggtggtaatt |
| | | ataattacctgtatagattgtttaggaagtctaatctcaaaccttttgagagagatatttcaactgaaatctatcaggccggtagcacaccttgtaatggtgttgaaggttttaattgtt |
| | | actttcctttacaatcatatggtttccaacccactaatggtgttggttaccaaccatacagagtagtagtactttcttttgaacttctacatgcaccagcaactgtttgtggacctaaaa |
| | | agtctactaatttggttaaaaacaaatgtgtcaatttcTAA |
| 221 | P48 | ATGGGAGTCAAAGTTCTGTTTGCCCTGATCTGCATCGCTGTGGCCGAGGCCAAGagagtccaaccaacagaatctattgttagatttcc |
| | | taatattacaaacttgtgcccttttggtgaagtttttaacgccaccagatttgcatccgtgtatgcttggaacaggaagagaatcagcaactgtgttgctgattattctgtcctatataa |
| | | ttccgcatcattttccacttttaagtgttatggagtgtctcctactaaattaaatgatctctgctttactaatgtctatgcagattcatttgtaattagaggtgatgaagtcagacaaatcg |
| | | ctccagggcaaactggaaagattgctgattataattataaattaccagatgattttacaggctgcgttatagcttggaattctaacaatcttgattctaaggttggtggtaattataatt |
| | | acctgtatagattgtttaggaagtctaatctcaaaccttttgagagagatatttcaactgaaatctatcaggccggtagcacaccttgtaatggtgttgaaggttttaattgttactttcc |
| | | tttacaatcatatggtttccaacccactaatggtgttggttaccaaccatacagagtagtagtactttcttttgaacttctacatgcaccagcaactgtttgtggacctaaaaagtcta |
| | | ctaatttggttaaaaacaaatgtgtcaatttcTAA |
| 222 | P49 | ATGGGCGTGCACGAGTGCCCCGCCTGGCTGTGGCTGCTGCTGAGCCTGCTGAGCCTGCCCCTGGGCCTGCCCGTG |
| | | CTGGGCGCCagagtccaaccaacagaatctattgttagatttcctaatattacaaacttgtgcccttttggtgaagtttttaacgccaccagatttgcatccgtgtatgcttgg |
| | | aacaggaagagaatcagcaactgtgttgctgattattctgtcctatataattccgcatcattttccacttttaagtgttatggagtgtctcctactaaattaaatgatctctgctttactaa |
| | | tgtctatgcagattcatttgtaattagaggtgatgaagtcagacaaatcgctccagggcaaactggaaagattgctgattataattataaattaccagatgattttacaggctgcgt |
| | | tatagcttggaattctaacaatcttgattctaaggttggtggtaattataattacctgtatagattgtttaggaagtctaatctcaaaccttttgagagagatatttcaactgaaatctatc |
| | | aggccggtagcacaccttgtaatggtgttgaaggttttaattgttactttcctttacaatcatatggtttccaacccactaatggtgttggttaccaaccatacagagtagtagtactttc |
| | | ttttgaacttctacatgcaccagcaactgtttgtggacctaaaaagtctactaatttggttaaaaacaaatgtgtcaatttcTAA |
| 223 | P50 | ATGTACCGGATGCAGTTGTTGTCCTGTATAGCTCTTTCCCTTGCATTGGTCACTAATTCTAGGGTTCAGCCTACTGAGT |
| | | CCATCGTGAGATTCCCAAACATCACAAATCTTTGTCCCTTCGGTGAGGTATTCAATGCGACACGATTTGCCTCAGTGTA |
| | | CGCGTGGAATCGGAAGAGGATCTCCAATTGCGTGGCCGACTACTCCGTCTTATACAACTCAGCTAGCTTTTCAACATT |
| | | CAAGTGCTATGGCGTGAGCCCTACCAAGCTCAATGACCTGTGCTTCACTAATGTGTATGCCGACTCTTTTGTCATTCG |
| | | CGGCGACGAGGTCCGACAAATCGCACCGGGCCAAACCGGTAAAATTGCCGACTACAACTACAAGCTGCCTGACGAC |
| | | TTCACCGGCTGCGTAATCGCCTGGAACAGCAATAACCTGGATAGCAAAGTGGGCGGAAACTACAACTACCTGTACCG |
| | | GCTCTTTAGAAAGTCCAACCTGAAACCATTCGAGCGCGATATCTCGACCGAAATCTACCAGGCGGGCAGCACCCCCT |
| | | GTAATGGTGTAGAAGGGTTCAATTGTTACTTTCCACTCCAGAGTTATGGGTTCCAGCCGACCAATGGCGTCGGTTATC |
| | | AACCATATCGCGTTGTGGTGTTGTCCTTTGAGCTGCTACACGCCCCAGCTACAGTGTGCGGGCCAAAGAAAAGCACA |
| | | AATCTTGTCAAGAACAAATGCGTTAACTTTTAA |
| 224 | P52 | ATGTACCGGATGCAGTTGTTGTCCTGTATAGCTCTTTCCCTTGCATTGGTCACTAATTCTGTGAACCTCACCACTCGCA |
| | | CACAGCTACCTCCCGCGTACACTAATTCATTTACCAGGGGCGTCTATTATCCTGATAAGGTGTTCCGGAGTTCAGTGT |
| | | TGCATAGCACTCAAGACCTGTTCCTGCCCTTCTTCTCCAATGTCACTTGGTTTCATGCGATACATGTGTCTGGTACCAA |
| | | CGGAACGAAGAGATTTGATAACCCCGTACTGCCATTCAATGATGGCGTATACTTTGCTTCGACTGAAAAATCCAACAT |
| | | CATCAGGGGCTGGATTTTTGGTACAACGCTTGATTCCAAGACCCAGTCCCTCCTTATTGTGAACAATGCGACCAACGT |
| | | CGTGATAAAGGTCTGTGAGTTTCAGTTCTGCAATGACCCATTCCTTGGAGTGTATTATCACAAGAACAACAAATCGTGG |
| | | ATGGAGTCAGAGTTTAGGGTGTACAGCAGCGCTAACAACTGTACATTTGAGTATGTGAGTCAGCCGTTTCTGATGGAT |
| | | CTTGAGGGCAAACAGGGCAATTTTAAGAATCTCAGAGAATTTGTGTTCAAGAACATTGATGGTTACTTTAAGATCTATA |
| | | GCAAACATACGCCAATCAACTTGGTTCGTGATCTGCCACAGGGATTTAGCGCACTGGAACCTCTCGTTGACTTGCCCA |
| | | TAGGTATTAACATCACCAGGTTCCAGACGCTCTTGGCATTACACCGTAGTTATCTGACCCCCGGGGACTCCAGTTCCG |
| | | GATGGACTGCAGGAGCCGCTGCCTACTATGTGGGTTACCTCCAGCCCAGGACCTTTCTTTTGAAATATAACGAGAAC |
| | | GGCACAATCACTGATGCTGTGGACTGCGCATTGGATCCTTTGTCAGAGACTAAGTGCACTCTGAAGTCATTCACAGTC |
| | | GAGAAAGGCATTTACCAGACGTCTAACTTCAGGGTTCAGCCTACTGAGTCCATCGTGAGATTCCCAAACATCACAAAT |
| | | CTTTGTCCCTTCGGTGAGGTATTCAATGCGACACGATTTGCCTCAGTGTACGCGTGGAATCGGAAGAGGATCTCCAAT |
| | | TGCGTGGCCGACTACTCCGTCTTATACAACTCAGCTAGCTTTTCAACATTCAAGTGCTATGGCGTGAGCCCTACCAAG |
| | | CTCAATGACCTGTGCTTCACTAATGTGTATGCCGACTCTTTTGTCATTCGCGGCGACGAGGTCCGACAAATCGCACCG |
| | | GGCCAAACCGGTAAAATTGCCGACTACAACTACAAGCTGCCTGACGACTTCACCGGCTGCGTAATCGCCTGGAACAG |
| | | CAATAACCTGGATAGCAAAGTGGGCGGAAACTACAACTACCTGTACCGGCTCTTTAGAAAGTCCAACCTGAAACCATT |
| | | CGAGCGCGATATCTCGACCGAAATCTACCAGGGGGGCAGCACCCCCTGTAATGGTGTAGAAGGGTTCAATTGTTACT |
| | | TTCCACTCCAGAGTTATGGGTTCCAGCCGACCAATGGCGTCGGTTATCAACCATATCGCGTTGTGGTGTTGTCCTTTG |
| | | AGCTGCTACACGCCCCAGCTACAGTGTGCGGGCCAAAGAAAAGCACAAATCTTGTCAAGAACAAATGCGTTAACTTTA |
| | | ATTTTAATGGACTCACAGGTACAGGAGTCCTGACCGAATCTAATAAGAAGTTCCTGCCCTTTCAACAGTTCGGACGAG |
| | | ACATTGCCGACACCACCGATGCCGTTCGGGACCCACAGACCTTAGAAATTCTGGATATTACTCCATGTAGTTTTGGGG |
| | | GAGTGTCTGTCATCACCCCTGGCACTAATACATCTAACCAGGTTGCAGTCCTCTACCAGGATGTGAACTGTACCGAAG |
| | | TGCCGGTCGCTATTCACGCAGACCAGCTCACTCCTACCTGGCGGGTGTACTCCACAGGCTCTAACGTGTTTCAGACA |
| | | CGTGCAGGGTGCCTAATCGGCGCAGAGCATGTAAATAACTCCTATGAGTGTGATATCCCCATCGGAGCCGGGATCTG |
| | | CGCTTCCTACCAGACACAAACGAATAGTCCCGGATCTGCCTCAAGCGTGGCATCTCAATCCATTATAGCATATACGAT |
| | | GTCCCTTGGAGCTGAAAACAGCGTTGCGTATTCAAACAATAGTATCGCTATTCCAACCAATTTTACAATTAGCGTGACC |
| | | ACAGAAATACTCCCTGTGAGCATGACCAAGACCAGTGTAGACTGTACTATGTACATCTGCGGCGACAGTACTGAGTGT |
| | | AGCAATCTGCTGCTACAGTATGGGTCCTTCTGTACTCAGCTTAATCGGGCTCTCACCGGAATCGCTGTAGAGCAAGAT |
| | | AAAAACACACAAGAAGTGTTTGCTCAAGTGAAGCAGATCTATAAGACACCTCCCATCAAGGATTTCGGTGGGTTCAAC |
| | | TTTAGCCAGATTCTGCCCGATCCGTCTAAACCGTCCAAGCGAAGTTTCATCGAAGACCTGCTTTTCAATAAGGTCACG |
| | | CTGGCAGATGCTGGATTTATCAAACAGTACGGCGACTGTCTGGGCGATATCGCCGCAAGAGACTTGATATGCGCCCA |
| | | AAAGTTTAATGGGTTAACCGTCCTTCCACCGCTCCTGACAGACGAGATGATCGCCCAGTATACAAGTGCCTTATTAGC |
| | | TGGGACCATTACTAGTGGATGGACATTTGGCGCCGGGGCTGCTCTACAGATACCCTTCGCCATGCAGATGGCTTACC |
| | | GCTTCAACGGAATCGGAGTTACCCAGAACGTACTGTACGAAAATCAGAAACTCATAGCTAATCAATTTAACTCTGCCAT |
| | | CGGGAAGATTCAGGATTCCCTGTCGTCTACAGCGTCCGCCTTGGGGAAACTGCAAGATGTAGTGAACCAGAACGCCC |
| | | AGGCCTTAAATACTCTGGTCAAGCAGTTATCTTCAAATTTCGGAGCAATTAGCTCTGTGTTGAACGATATTCTTTCCAG |
| | | GCTGGACCCTCCAGAAGCCGAAGTGCAAATAGACCGGCTCATCACGGGGCGCTTGCAAAGCCTGCAAACCTATGTCA |
| | | CCCAGCAACTGATTCGAGCAGCCGAGATCCGGGCCAGTGCTAATCTGGCCGCCACAAAAATGAGCGAGTGCGTCCT |
| | | CGGGCAGAGCAAACGCGTAGACTTCTGCGGTAAAGGCTATCACCTGATGAGCTTCCCTCAGAGCGCACCCCACGGG |
| | | GTGGTCTTCCTCCACGTTACCTACGTCCCTGCGCAGGAGAAGAACTTCACTACGGCCCCTGCAATTTGCCACGATGG |
| | | CAAGGCCCACTTTCCCAGGGAGGGGGTCTTCGTTTCCAACGGGACTCATTGGTTCGTGACTCAGAGAAATTTTTATGA |
| | | ACCTCAGATCATTACCACTGATAATACATTCGTGTCTGGCAACTGTGATGTGGTTATTGGGATAGTTAATAATACGGTA |
| | | TACGACCCACTCCAGCCCGAGCTGGACTCCTTCAAAGAGGAGCTGGACAAGTACTTTAAAAATCACACCTCACCTGAT |
| | | GTGGACCTAGGTGACATATCTGGCATAAATGCTAGCGTGGTTAACATTCAGAAGGAAATCGACAGACTCAACGAGGT |
| | | GGCCAAAAATCTGAACGAGAGTCTGATCGACCTGCAGGAGTTGGGAAAATATGAACAGTACATCAAATGGCCATGGT |
| | | ACATCTGGCTGGGCTTCATAGCAGGCCTGATCGCCATCGTCATGGTGACTATTATGCTGTGCTGCATGACATCCTGTT |
| | | GTAGCTGTTTGAAGGGGTGTTGCTCCTGCGGCTCATGCTGCAAATTCGACGAGGACGATTCAGAACCTGTGCTGAAG |
| | | GGAGTGAAGCTGCATTACACATAA |
| 225 | P54 | ATGGGAGTCAAAGTTCTGTTTGCCCTGATCTGCATCGCTGTGGCCGAGGCCAAGgttaatcttacaaccagaactcaattaccccctgc |
| | | atacactaattctttcacacgtggtgtttattaccctgacaaagttttcagatcctcagttttacattcaactcaggacttgttcttacctttcttttccaatgttacttggttccatgcta |
| | | tacatgtctctgggaccaatggtactaagaggtttgataaccctgtcctaccatttaatgatggtgtttattttgcttccactgagaagtctaacataataagaggctggatttttggtact |
| | | actttagattcgaagacccagtccctacttattgttaataacgctactaatgttgttattaaagtctgtgaatttcaattttgtaatgatccatttttgggtgtttattaccacaaaaacaa |
| | | caaaagttggatggaaagtgagttcagagtttattctagtgcgaataattgcacttttgaatatgtctctcagccttttcttatggaccttgaaggaaaacagggtaatttcaaaaatctta |
| | | gggaatttgtgtttaagaatattgatggttattttaaaatatattctaagcacacgcctattaatttagtgcgtgatctccctcagggtttttcggctttagaaccattggtagatttgcca |
| | | ataggtattaacatcactaggtttcaaactttacttgctttacatagaagttatttgactcctggtgattcttcttcaggttggacagctggtgctgcagcttattatgtgggttatcttca |
| | | acctaggacttttctattaaaatataatgaaaatggaaccattacagatgctgtagactgtgcacttgaccctctctcagaaacaaagtgtacgttgaaatccttcactgtagaaaa |
| | | aggaatctatcaaacttctaactttagagtccaaccaacagaatctattgttagatttcctaatattacaaacttgtgcccttttggtgaagtttttaacgccaccagatttgcatccgt |
| | | gtatgcttggaacaggaagagaatcagcaactgtgttgctgattattctgtcctatataattccgcatcattttccacttttaagtgttatggagtgtctcctactaaattaaatgatctct |
| | | gctttactaatgtctatgcagattcatttgtaattagaggtgatgaagtcagacaaatcgctccagggcaaactggaaagattgctgattataattataaattaccagatgattttac |
| | | aggctgcgttatagcttggaattctaacaatcttgattctaaggttggtggtaattataattacctgtatagattgtttaggaagtctaatctcaaaccttttgagagagatatttcaact |
| | | gaaatctatcaggccggtagcacaccttgtaatggtgttgaaggttttaattgttactttcctttacaatcatatggtttccaacccactaatggtgttggttaccaaccatacagagta |
| | | gtagtactttcttttgaacttctacatgcaccagcaactgtttgtggacctaaaaagtctactaatttggttaaaaacaaatgtgtcaatttcaacttcaatggtttaacaggcacagg |
| | | tgttcttactgagtctaacaaaaagtttctgcctttccaacaatttggcagagacattgctgacactactgatgctgtccgtgatccacagacacttgagattcttgacattacaccat |
| | | gttcttttggtggtgtcagtgttataacaccaggaacaaatacttctaaccaggttgctgttctttatcaggatgttaactgcacagaagtccctgttgctattcatgcagatcaactta |
| | | ctcctacttggcgtgtttattctacaggttctaatgtttttcaaacacgtgcaggctgtttaataggggctgaacatgtcaacaactcatatgagtgtgacatacccattggtgcaggt |
| | | atatgcgctagttatcagactcagactaattctcctggcagcgccagcagtgtagctagtcaatccatcattgcctacactatgtcacttggtgcagaaaattcagttgcttactcta |
| | | ataactctattgccatacccacaaattttactattagtgttaccacagaaattctaccagtgtctatgaccaagacatcagtagattgtacaatgtacatttgtggtgattcaactgaa |
| | | tgcagcaatcttttgttgcaatatggcagtttttgtacacaattaaaccgtgctttaactggaatagctgttgaacaagacaaaaacacccaagaagtttttgcacaagtcaaaca |
| | | aatttacaaaacaccaccaattaaagattttggtggttttaatttttcacaaatattaccagatccatcaaaaccaagcaagaggtcatttattgaagatctacttttcaacaaagtg |
| | | acacttgcagatgctggcttcatcaaacaatatggtgattgccttggtgatattgctgctagggacctcatttgtgcacaaaagtttaacggccttactgttttgccacctttgctcac |
| | | agatgaaatgattgctcaatacacttctgcactgttagcgggtacaatcacttctggttggacctttggtgcaggtgctgcattacaaataccatttgctatgcaaatggcttatagg |
| | | tttaatggtattggagttacacagaatgttctctatgagaaccaaaaattgattgccaaccaatttaatagtgctattggcaaaattcaagactcactttcttccacagcaagtgca |
| | | cttggaaaacttcaagatgtggtcaaccaaaatgcacaagctttaaacacgcttgttaaacaacttagctccaattttggtgcaatttcaagtgttttaaatgatatcctttcacgtctt |
| | | gaccctcccgaggctgaagtgcaaattgataggttgatcacaggcagacttcaaagtttgcagacatatgtgactcaacaattaattagagctgcagaaatcagagcttctgct |
| | | aatcttgctgctactaaaatgtcagagtgtgtacttggacaatcaaaaagagttgatttttgtggaaagggctatcatcttatgtccttccctcagtcagcacctcatggtgtagtcttc |
| | | ttgcatgtgacttatgtccctgcacaagaaaagaacttcacaactgctcctgccatttgtcatgatggaaaagcacactttcctcgtgaaggtgtctttgtttcaaatggcacacact |
| | | ggtttgtaacacaaaggaatttttatgaaccacaaatcattactacagacaacacatttgtgtctggtaactgtgatgttgtaataggaattgtcaacaacacagtttatgatcctttg |
| | | caacctgaattagactcattcaaggaggagttagataaatattttaagaatcatacatcaccagatgttgatttaggtgacatctctggcattaatgcttcagttgtaaacattcaaa |
| | | aagaaattgaccgcctcaatgaggttgccaagaatttaaatgaatctctcatcgatctccaagaacttggaaagtatgagcagtatataaaatggccatggtacatttggctag |
| | | gttttatagctggcttgattgccatagtaatggtgacaattatgctttgctgtatgaccagttgctgtagttgtctcaagggctgttgttcttgtggatcctgctgcaaatttgatgaagac |
| | | gactctgagccagtgctcaaaggagtcaaattacattacaca |
| 226 | P56 | atgtttgtttttcttgttttattgccactagtctctagtcagtgtagagtccaaccaacagaatctattgttagatttcctaatattacaaacttgtgcccttttggtgaagtttttaacgc |
| | | caccagatttgcatccgtgtatgcttggaacaggaagagaatcagcaactgtgttgctgattattctgtcctatataattccgcatcattttccacttttaagtgttatggagtgtctccta |
| | | ctaaattaaatgatctctgctttactaatgtctatgcagattcatttgtaattagaggtgatgaagtcagacaaatcgctccagggcaaactggaaagattgctgattataattataaatt |
| | | accagatgattttacaggctgcgttatagcttggaattctaacaatcttgattctaaggttggtggtaattataattacctgtatagattgtttaggaagtctaatctcaaaccttttgag |
| | | agagatatttcaactgaaatctatcaggccggtagcacaccttgtaatggtgttgaaggttttaattgttactttcctttacaatcatatggtttccaacccactaatggtgttggttacc |
| | | aaccatacagagtagtagtactttcttttgaacttctacatgcaccagcaactgtttgtggacctaaaaagtctactaatttggttaaaaacaaatgtgtcaatttcGGGTATAT |
| | | CCCTGAAGCCCCCAGGGACGGCCAGGCTTACGTCAGAAAGGATGGAGAGTGGGTGCTCTTGAGCACCTTCCTGTAA |
| 227 | P59 | atgtttgtttttcttgttttattgccactagtctctagtcagtgtgttaatcttacaaccagaactcaattaccccctgcatacactaattctttcacacgtggtgtttattaccctgaca |
| | | aagttttcagatcctcagttttacattcaactcaggatttgttcttacctttcttttccaatgttacttggttccatgctatacatgtctctgggaccaatggtactaagaggtttgataac |
| | | cctgtcctaccatttaatgatggtgtttattttgcttccactgagaagtctaacataataagaggctggatctttggtactactttagattcgaagacccagtccctacttattgttaataa |
| | | cgctactaatgttgttattaaagtctgtgaatttcaattttgtaatgatccatttttgggtgtttattaccacaaaaacaacaaaagttggatggaaagtgagttcagagtttattctagtg |
| | | cgaataattgcacttttgaatatgtctctcagccttttcttatggaccttgaaggaaaacagggtaatttcaaaaatcttagggaatttgtgtttaagaatattgatggttattttaaaata |
| | | tattctaagcacacgcctattaatttagtgcgtgatctccctcagggtttttcggctttagaaccattggtagatttgccaataggtattaacatcactaggtttcaaactttacttgcttt |
| | | acatagaagttatttgactcctggtgattcttcttcaggttggacagctggtgctgcagcttattatgtgggttatcttcaacctaggacttttctattaaaatataatgaaaatggaacca |
| | | ttacagatgctgtagactgtgcacttgaccctctctcagaaacaaagtgtacgttgaaatccttcactgtagaaaaaggaatctatcaaacttctaactttagagtccaaccaacaga |
| | | atctattgttagatttcctaatattacaaacttgtgcccttttggtgaagtttttaacgccaccagatttgcatccgtgtatgcttggaacaggaagagaatcagcaactgtgttgctga |
| | | ttattctgtcctatataattccgcatcattttccacttttaagtgttatggagtgtctcctactaaattaaatgatctctgctttactaatgtctatgcagattcatttgtaattagaggtg |
| | | atgaagtcagacaaatcgctccagggcaaactggaaagattgctgattataattataaattaccagatgattttacaggctgcgttatagcttggaattctaacaatcttgattctaaggtt |
| | | ggtggtaattataattacctgtatagattgtttaggaagtctaatctcaaaccttttgagagagatatttcaactgaaatctatcaggccggtagcacaccttgtaatggtgttgaag |
| | | gttttaattgttactttcctttacaatcatatggtttccaacccactaatggtgttggttaccaaccatacagagtagtagtactttcttttgaacttctacatgcaccagcaactgtttgt |
| | | ggacctaaaaagtctactaatttggttaaaaacaaatgtgtcaatttcaacttcaatggtttaacaggcacaggtgttcttactgagtctaacaaaaagtttctgcctttccaacaattt |
| | | ggcagagacattgctgacactactgatgctgtccgtgatccacagacacttgagattcttgacattacaccatgttcttttggtggtgtcagtgttataacaccaggaacaaatact |
| | | tctaaccaggttgctgttctttatcaggatgttaactgcacagaagtccctgttgctattcatgcagatcaacttactcctacttggcgtgtttattctacaggttctaatgtttttcaaac |
| | | acgtgcaggctgtttaataggggctgaacatgtcaacaactcatatgagtgtgacatacccattggtgcaggtatatgcgctagttatcagactcagactaattctcctcggcggg |
| | | cacgtagtgtagctagtcaatccatcattgcctacactatgtcacttggtgcagaaaattcagttgcttactctaataactctattgccatacccacaaattttactattagtgttacca |
| | | cagaaattctaccagtgtctatgaccaagacatcagtagattgtacaatgtacatttgtggtgattcaactgaatgcagcaatcttttgttgcaatatggcagtttttgtacacaatta |
| | | aaccgtgctttaactgggatagctgttgaacaagacaaaaacacccaagaagtttttgcacaagtcaaacaaatttacaaaacaccaccaattaaagattttggtggttttaatt |
| | | tttcacaaatattaccagatccatcaaaaccaagcaagaggtcatttattgaagatctacttttcaacaaagtgacacttgcagatgctggcttcatcaaacaatatggtgattgc |
| | | cttggtgatattgctgctagggacctcatttgtgcacaaaagtttaacggccttactgttttgccacctttgctcacagatgaaatgattgctcaatacacttctgcactgttagcgggt |
| | | acaatcacttctggttggacctttggtgcaggtgctgcattacaaataccatttgctatgcaaatggcttataggtttaatggtattggagttacacagaatgttctctatgagaacca |
| | | aaaattgattgccaaccaatttaatagtgccattggcaaaattcaagactcactttcttccacagcaagtgcacttggaaaacttcaagatgtggtcaaccaaaatgcacaagc |
| | | tttaaacacgcttgttaaacaacttagctccaattttggtgcaatttcaagtgttttaaatgatatcctttcacgtcttgaccctcccgaggctgaagtgcaaattgataggttgatcac |
| | | aggcagacttcaaagtttgcagacatatgtgactcaacaattaattagagctgcagaaatcagagcttctgctaatcttgctgctactaaaatgtcagagtgtgtacttggacaat |
| | | caaaaagagttgatttttgtggaaagggctatcatcttatgtccttccctcagtcagcacctcatggtgtagtcttcttgcatgtgacttatgtccctgcacaagaaaagaacttcac |
| | | aactgctcctgccatttgtcatgatggaaaagcacactttcctcgtgaaggtgtctttgtttcaaatggcacacactggtttgtaacacaaaggaatttttatgaaccacaaatcatt |
| | | actacagacaacacatttgtgtctggtaactgtgatgttgtaataggaattgtcaacaacacagtttatgatcctttgcaacctgaattagactcattcaaggaggagttagataaa |
| | | tattttaagaatcatacatcaccagatgttgatttaggtgacatctctggcattaatgcttcagttgtaaacattcaaaaagaaattgaccgcctcaatgaggttgccaagaatttaa |
| | | atgaatctctcatcgatctccaagaacttggaaagtatgagcagtatataaaatggccatggtacatttggctaggttttatagctggcttgattgccatagtaatggtgacaattat |
| | | gctttgctgtatgaccagttgctgtagttgtctcaagggctgttgttcttgtggatcctgctgcaaatttgatgaagacgactctgagccagtgctcaaaggagtcaaattacattac |
| | | aca |
| 228 | P60 | atgtttgtttttcttgttttattgccactagtctctagtcagtgtgttaatcttacaaccagaactcaattaccccctgcatacactaattctttcacacgtggtgtttattaccctgacaa |
| | | agttttcagatcctcagttttacattcaactcaggatttgttcttacctttcttttccaatgttacttggttccatgctatacatgtctctgggaccaatggtactaagaggtttgataacc |
| | | ctgtcctaccatttaatgatggtgtttattttgcttccactgagaagtctaacataataagaggctggatctttggtactactttagattcgaagacccagtccctacttattgttaataac |
| | | gctactaatgttgttattaaagtctgtgaatttcaattttgtaatgatccatttttgggtgtttattaccacaaaaacaacaaaagttggatggaaagtgagttcagagtttattctagtgc |
| | | gaataattgcacttttgaatatgtctctcagccttttcttatggaccttgaaggaaaacagggtaatttcaaaaatcttagggaatttgtgtttaagaatattgatggttattttaaaatat |
| | | attctaagcacacgcctattaatttagtgcgtgatctccctcagggtttttcggctttagaaccattggtagatttgccaataggtattaacatcactaggtttcaaactttacttgcttta |
| | | catagaagttatttgactcctggtgattcttcttcaggttggacagctggtgctgcagcttattatgtgggttatcttcaacctaggacttttctattaaaatataatgaaaatggaaccat |
| | | tacagatgctgtagactgtgcacttgaccctctctcagaaacaaagtgtacgttgaaatccttcactgtagaaaaaggaatctatcaaacttctaactttagagtccaaccaacaga |
| | | atctattgttagatttcctaatattacaaacttgtgcccttttggtgaagtttttaacgccaccagatttgcatccgtgtatgcttggaacaggaagagaatcagcaactgtgttgctga |
| | | ttattctgtcctatataattccgcatcattttccacttttaagtgttatggagtgtctcctactaaattaaatgatctctgctttactaatgtctatgcagattcatttgtaattagaggtg |
| | | atgaagtcagacaaatcgctccagggcaaactggaaagattgctgattataattataaattaccagatgattttacaggctgcgttatagcttggaattctaacaatcttgattctaaggtt |
| | | ggtggtaattataattacctgtatagattgtttaggaagtctaatctcaaaccttttgagagagatatttcaactgaaatctatcaggccggtagcacaccttgtaatggtgttgaag |
| | | gttttaattgttactttcctttacaatcatatggtttccaacccactaatggtgttggttaccaaccatacagagtagtagtactttcttttgaacttctacatgcaccagcaactgtttgt |
| | | ggacctaaaaagtctactaatttggttaaaaacaaatgtgtcaatttcaacttcaatggtttaacaggcacaggtgttcttactgagtctaacaaaaagtttctgcctttccaacaattt |
| | | ggcagagacattgctgacactactgatgctgtccgtgatccacagacacttgagattcttgacattacaccatgttcttttggtggtgtcagtgttataacaccaggaacaaatact |
| | | tctaaccaggttgctgttctttatcagggtgttaactgcacagaagtccctgttgctattcatgcagatcaacttactcctacttggcgtgtttattctacaggttctaatgtttttcaaac |
| | | acgtgcaggctgtttaataggggctgaacatgtcaacaactcatatgagtgtgacatacccattggtgcaggtatatgcgctagttatcagactcagactaattctcctcggcggg |
| | | cacgtagtgtagctagtcaatccatcattgcctacactatgtcacttggtgcagaaaattcagttgcttactctaataactctattgccatacccacaaattttactattagtgttacca |
| | | cagaaattctaccagtgtctatgaccaagacatcagtagattgtacaatgtacatttgtggtgattcaactgaatgcagcaatcttttgttgcaatatggcagtttttgtacacaatta |
| | | aaccgtgctttaactgggatagctgttgaacaagacaaaaacacccaagaagtttttgcacaagtcaaacaaatttacaaaacaccaccaattaaagattttggtggttttaatt |
| | | tttcacaaatattaccagatccatcaaaaccaagcaagaggtcatttattgaagatctacttttcaacaaagtgacacttgcagatgctggcttcatcaaacaatatggtgattgc |
| | | cttggtgatattgctgctagggacctcatttgtgcacaaaagtttaacggccttactgttttgccacctttgctcacagatgaaatgattgctcaatacacttctgcactgttagcgggt |
| | | acaatcacttctggttggacctttggtgcaggtgctgcattacaaataccatttgctatgcaaatggcttataggtttaatggtattggagttacacagaatgttctctatgagaacca |
| | | aaaattgattgccaaccaatttaatagtgccattggcaaaattcaagactcactttcttccacagcaagtgcacttggaaaacttcaagatgtggtcaaccaaaatgcacaagc |
| | | tttaaacacgcttgttaaacaacttagctccaattttggtgcaatttcaagtgttttaaatgatatcctttcacgtcttgaccctcccgaggctgaagtgcaaattgataggttgatcac |
| | | aggcagacttcaaagtttgcagacatatgtgactcaacaattaattagagctgcagaaatcagagcttctgctaatcttgctgctactaaaatgtcagagtgtgtacttggacaat |
| | | caaaaagagttgatttttgtggaaagggctatcatcttatgtccttccctcagtcagcacctcatggtgtagtcttcttgcatgtgacttatgtccctgcacaagaaaagaacttcac |
| | | aactgctcctgccatttgtcatgatggaaaagcacactttcctcgtgaaggtgtctttgtttcaaatggcacacactggtttgtaacacaaaggaatttttatgaaccacaaatcatt |
| | | actacagacaacacatttgtgtctggtaactgtgatgttgtaataggaattgtcaacaacacagtttatgatcctttgcaacctgaattagactcattcaaggaggagttagataaa |
| | | tattttaagaatcatacatcaccagatgttgatttaggtgacatctctggcattaatgcttcagttgtaaacattcaaaaagaaattgaccgcctcaatgaggttgccaagaatttaa |
| | | atgaatctctcatcgatctccaagaacttggaaagtatgagcagtatataaaatggccatggtacatttggctaggttttatagctggcttgattgccatagtaatggtgacaattat |
| | | gctttgctgtatgaccagttgctgtagttgtctcaagggctgttgttcttgtggatcctgctgcaaatttgatgaagacgactctgagccagtgctcaaaggagtcaaattacattac |
| | | aca |
| 229 | P61 | atgtttgtttttcttgttttattgccactagtctctagtcagtgtgttaatcttacaaccagaactcaattaccccctgcatacactaattctttcacacgtggtgtttattaccctgacaa |
| | | agttttcagatcctcagttttacattcaactcaggatttgttcttacctttcttttccaatgttacttggttccatgctatacatgtctctgggaccaatggtactaagaggtttgataacc |
| | | ctgtcctaccatttaatgatggtgtttattttgcttccactgagaagtctaacataataagaggctggatctttggtactactttagattcgaagacccagtccctacttattgttaataa |
| | | cgctactaatgttgttattaaagtctgtgaatttcaattttgtaatgatccatttttgggtgtttattaccacaaaaacaacaaaagttggatggaaagtgagttcagagtttattctagtg |
| | | cgaataattgcacttttgaatatgtctctcagccttttcttatggaccttgaaggaaaacagggtaatttcaaaaatcttagggaatttgtgtttaagaatattgatggttattttaaaata |
| | | tattctaagcacacgcctattaatttagtgcgtgatctccctcagggtttttcggctttagaaccattggtagatttgccaataggtattaacatcactaggtttcaaactttacttgcttt |
| | | acatagaagttatttgactcctggtgattcttcttcaggttggacagctggtgctgcagcttattatgtgggttatcttcaacctaggacttttctattaaaatataatgaaaatggaacca |
| | | ttacagatgctgtagactgtgcacttgaccctctctcagaaacaaagtgtacgttgaaatccttcactgtagaaaaaggaatctatcaaacttctaactttagagtccaaccaacaga |
| | | atctattgttagatttcctaatattacaaacttgtgcccttttggtgaagtttttaacgccaccagatttgcatccgtgtatgcttggaacaggaagagaatcagcaactgtgttgctga |
| | | ttattctgtcctatataattccgcatcattttccacttttaagtgttatggagtgtctcctactaaattaaatgatctctgctttactaatgtctatgcagattcatttgtaattagaggtg |
| | | atgaagtcagacaaatcgctccagggcaaactggaaagattgctgattataattataaattaccagatgattttacaggctgcgttatagcttggaattctaacaatcttgattctaaggtt |
| | | ggtggtaattataattacctgtatagattgtttaggaagtctaatctcaaaccttttgagagagatatttcaactgaaatctatcaggccggtagcacaccttgtaatggtgttgaag |
| | | gttttaattgttactttcctttacaatcatatggtttccaacccactaatggtgttggttaccaaccatacagagtagtagtactttcttttgaacttctacatgcaccagcaactgtttgt |
| | | ggacctaaaaagtctactaatttggttaaaaacaaatgtgtcaatttcaacttcaatggtttaacaggcacaggtgttcttactgagtctaacaaaaagtttctgcctttccaacaattt |
| | | ggcagagacattgctgacactactgatgctgtccgtgatccacagacacttgagattcttgacattacaccatgttcttttggtggtgtcagtgttataacaccaggaacaaatact |
| | | tctaaccaggttgctgttctttatcaggatgttaactgcacagaagtccctgttgctattcatgcagatcaacttactcctacttggcgtgtttattctacaggttctaatgtttttcaaac |
| | | acgtgcaggctgtttaataggggctgaacatgtcaacaactcatatgagtgtgacatacccattggtgcaggtatatgcgctagttatcagactcagactaattctcctcggcggg |
| | | cacgtagtgtagctagtcaatccatcattgcctacactatgtcacttggtgcagaaaattcagttgcttactctaataactctattgccatacccacaaattttactattagtgttacca |
| | | cagaaattctaccagtgtctatgaccaagacatcagtagattgtacaatgtacatttgtggtgattcaactgaatgcagcaatcttttgttgcaatatggcagtttttgtacacaatta |
| | | aaccgtgctttaactgggatagctgttgaacaagacaaaaacacccaagaagtttttgcacaagtcaaacaaatttacaaaacaccaccaattaaagattttggtggttttaatt |
| | | tttcacaaatattaccagatccatcaaaaccaagcaagaggtcatttattgaagatctacttttcaacaaagtgacacttgcagatgctggcttcatcaaacaatatggtgattgc |
| | | cttggtgatattgctgctagggacctcatttgtgcacaaaagtttaacggccttactgttttgccacctttgctcacagatgaaatgattgctcaatacacttctgcactgttagcgggt |
| | | acaatcacttctggttggacctttggtgcaggtgctgcattacaaataccatttgctatgcaaatggcttataggtttaatggtattggagttacacagaatgttctctatgagaacca |
| | | aaaattgattgccaaccaatttaatagtgccattggcaaaattcaagactcactttcttccacagcaagtgcacttggaaaacttcaagatgtggtcaaccaaaatgcacaagc |
| | | tttaaacacgcttgttaaacaacttagctccaattttggtgcaatttcaagtgttttaaatgatatcctttcacgtcttgaccctcccgaggctgaagtgcaaattgataggttgatcac |
| | | aggcagacttcaaagtttgcagacatatgtgactcaacaattaattagagctgcagaaatcagagcttctgctaatcttgctgctactaaaatgtcagagtgtgtacttggacaat |
| | | caaaaagagttgatttttgtggaaagggctatcatcttatgtccttccctcagtcagcacctcatggtgtagtcttcttgcatgtgacttatgtccctgcacaagaaaagaacttcac |
| | | aactgctcctgccatttgtcatgatggaaaagcacactttcctcgtgaaggtgtctttgtttcaaatggcacacactggtttgtaacacaaaggaatttttatgaaccacaaatcatt |
| | | actacagacaacacatttgtgtctggtaactgtgatgttgtaataggaattgtcaacaacacagtttatgatcctttgcaacctgaattagactcattcaaggaggagttagataaa |
| | | tattttaagaatcatacatcaccagatgttgatttaggtgacatctctggcattaatgcttcagttgtaaacattcaaaaagaaattgaccgcctcaatgaggttgccaagaatttaa |
| | | atgaatctctcatcgatctccaagaacttggaaagtatgagcagtatataaaatggccatggtacatttggctaggttttatagctggcttgattgccatagtaatggtgacaattat |
| | | gctttgctgtatgaccagttgctgtagttgtctcaagggctgttgttcttgtggatcctgctgcaaatttgatgaagacgactctgagccagtgctcaaaggagtcaaattacattac |
| | | aca |
| 230 | P63 | ATGGGCGTGCACGAGTGCCCCGCCTGGCTGTGGCTGCTGCTGAGCCTGCTGAGCCTGCCCCTGGGCCTGCCCGTG |
| | | CTGGGCGCCagagtccaaccaacagaatctattgttagatttcctaatattacaaacttgtgcccttttggtgaagtttttaacgccaccagatttgcatccgtgtatgcttgg |
| | | aacaggaagagaatcagcaactgtgttgctgattattctgtcctatataattccgcatcattttccacttttaagtgttatggagtgtctcctactaaattaaatgatctctgctttactaa |
| | | tgtctatgcagattcatttgtaattagaggtgatgaagtcagacaaatcgctccagggcaaactggaaagattgctgattataattataaattaccagatgattttacaggctgcgt |
| | | tatagcttggaattctaacaatcttgattctaaggttggtggtaattataattacctgtatagattgtttaggaagtctaatctcaaaccttttgagagagatatttcaactgaaatctatc |
| | | aggccggtagcacaccttgtaatggtgttgaaggttttaattgttactttcctttacaatcatatggtttccaacccactaatggtgttggttaccaaccatacagagtagtagtactttc |
| | | ttttgaacttctacatgcaccagcaactgtttgtggacctaaaaagtctactaatttggttaaaaacaaatgtgtcaatttcTAA |
| 231 | P64 | ATGTACCGGATGCAGTTGTTGTCCTGTATAGCTCTTTCCCTTGCATTGGTCACTAATTCTagagtccaaccaacagaatctattgtta |
| | | gatttcctaatattacaaacttgtgcccttttggtgaagtttttaacgccaccagatttgcatccgtgtatgcttggaacaggaagagaatcagcaactgtgttgctgattattctgtcct |
| | | atataattccgcatcattttccacttttaagtgttatggagtgtctcctactaaattaaatgatctctgctttactaatgtctatgcagattcatttgtaattagaggtgatgaagtcagac |
| | | aaatcgctccagggcaaactggaaagattgctgattataattataaattaccagatgattttacaggctgcgttatagcttggaattctaacaatcttgattctaaggttggtggtaatt |
| | | ataattacctgtatagattgtttaggaagtctaatctcaaaccttttgagagagatatttcaactgaaatctatcaggccggtagcacaccttgtaatggtgttgaaggttttaattgtt |
| | | actttcctttacaatcatatggtttccaacccactaatggtgttggttaccaaccatacagagtagtagtactttcttttgaacttctacatgcaccagcaactgtttgtggacctaaaa |
| | | agtctactaatttggttaaaaacaaatgtgtcaatttcTAA |
| 232 | 2A6200 | atgttcgtgttcctggtgctgctccccctggtgagctcccagtgcgtcaactttaccaaccggacccagctgcccagtgcctataccaacagcttcacccgcggcgtctactacc |
| | | ccgacaaggtgttccggagcagcgtgctgcacagcacccaggacctcttcctccccttttttagcaacgtgacctggttccacgccatccacgtgagtggcaccaacggcac |
| | | caagcggttcgacaaccctgtgctccccttcaacgacggcgtgtacttcgctagcacagaaaaaagtaacatcattcggggctggatcttcggcaccacactcgacagtaag |
| | | acccagagcctgctgattgtgaataacgccaccaacgtggtgatcaaggtgtgcgagttccagttctgcaactaccccttcctgggcgtgtactaccacaagaacaacaaga |
| | | gctggatggagagcgagttccgcgtgtatagctctgccaacaactgcacctttgagtacgtgagccagcccttcctgatggacctggagggcaagcagggcaatttcaaaa |
| | | acctcagcgagttcgtgttcaagaacatcgacggctacttcaagatctacagcaagcacacccccatcaacctggtgcgggacctgccccagggctttagcgctctggagc |
| | | ccctggtggacctgcccatcggcatcaacatcacccgcttccaaaccctgttggccctgcaccggagctacctgacccctggcgatagcagtagtggctggacagccggag |
| | | ccgccgcctactacgtgggatacctgcagccccggaccttcctgctgaagtacaacgagaacggcacaatcacagacgctgtggactgcgccctggaccccctgagcga |
| | | aacaaagtgcaccctcaaaagtttcaccgtggagaagggcatctaccagaccagcaacttccgggtgcagcccaccgagagcatcgtgcggttccccaacatcaccaac |
| | | ctgtgccccttcggcgaggtgttcaacgccacccggttcgccagcgtgtacgcctggaaccggaagcggatcagcaactgcgtggccgactacagcgtgctgtataacagt |
| | | gccagcttcagcaccttcaagtgctacggcgtgagccccaccaagctgaacgacctgtgcttcaccaacgtgtacgccgatagctttgtgatccggggcgacgaggtgcgg |
| | | cagatcgcccccggccagacaggcacaattgccgattacaattacaagctgcccgacgatttcaccggctgcgtgatcgcctggaacagcaacaacctggacagcaagg |
| | | tgggcggaaactacaactacctgtaccggctgttccgcaaaagtaacctcaagcctttcgagcgggacatcagcaccgagatctaccaggccggcagtaccccttgcaac |
| | | ggcgtgaagggcttcaactgctacttccccctgcagagctacggcttccagcccacctacggcgtgggctaccagccctaccgggtggtggttctgagcttcgagctgctgca |
| | | cgcccctgccaccgtgtgcggccccaagaaaagcaccaacctggtgaagaacaagtgcgtgaacttcaactttaacggactgacaggcaccggcgtgctgaccgagag |
| | | caacaagaagttcctgcccttccagcaattcggccgggatattgccgacaccaccgacgccgtgcgggacccccagaccctggagatcctggacatcacaccctgtagctt |
| | | cggcggcgtgagcgtgatcacccccggcaccaacaccagcaaccaggtggccgtgctctaccaaggcgtgaactgcaccgaggtgcccgtggccatccacgccgacc |
| | | agctgacccccacctggcgggtgtacagcaccggcagcaacgtgttccagacccgggccggctgcctgatcggcgccgagtacgtgaataacagctacgagtgcgacat |
| | | ccccatcggagccggaatctgcgccagctaccagacccagaccaacagcccccggagagcccggagcgtggccagccagagcattattgcctacaccatgagcctgg |
| | | gcgccgagaacagcgtggcctacagcaacaatagtattgccatccccaccaacttcaccatcagcgtgaccactgaaatcctccccgtgagcatgaccaagaccagcgtg |
| | | gactgcaccatgtacatctgcggcgacagcaccgagtgcagcaacctgctcctgcagtacggcagcttctgcacccagctgaaccgggccctgaccggaattgccgtgga |
| | | gcaggacaagaacacccaggaggtgttcgcccaggtgaagcagatctacaagacacctcctatcaaggacttcgggggttcaacttcagccagatcctgcccgacccc |
| | | agcaagcccagcaagcggagcttcatcgaggacctgttgttcaacaaggtgaccctggccgacgccggcttcatcaagcagtacggcgactgtctgggagatattgccgc |
| | | acgggacctgatctgcgcccagaagttcaacggcctgaccgtgctgcctcctctgctgaccgacgagatgatcgcccagtacacaagcgctctgctcgccggcaccatcac |
| | | cagcggctggaccttcggcgccggcgctgccctgcagatccccttcgccatgcagatggcctaccggttcaacggcatcggcgtgacccagaacgtgctgtacgagaacc |
| | | agaagctgatcgccaaccagttcaacagcgccatcggcaagatccaggacagcctgagctccaccgccagcgccctgggcaagctgcaggacgtggtgaaccagaac |
| | | gcccaggccctgaacaccctggtgaagcagctgagcagcaacttcggcgccatcagctctgtgctgaacgacatcctgagccggctggaccccccagaggccgaggtgc |
| | | aaatcgatcggctcatcaccggccggctgcagagcctgcagacctacgtgacacagcagctgatccgggccgccgagatccgggccagcgccaacctggccgctatca |
| | | agatgagcgagtgcgtgctgggccagagcaagcgggtggacttctgcggcaagggctaccacctgatgagcttcccccagagcgccccccacggcgtggtgttcctgcac |
| | | gtgacctacgtgcccgcccaggagaagaacttcaccaccgcccccgccatctgccacgacggcaaggcccacttcccccgggagggcgtgttcgtgagcaacggcacc |
| | | cactggttcgtgacccagcggaacttctacgagccccagatcataaccaccgacaacaccttcgtgagcggcaactgcgacgtggtcatcggcatcgtgaacaacaccgt |
| | | gtacgaccccctgcagcccgagctggacagcttcaaggaggaactggacaagtacttcaagaaccacaccagccccgacgtggacctgggcgacatcagcggcatca |
| | | acgccagcttcgtgaacatccagaaggagatcgaccggctgaacgaggtggccaagaacctgaacgagagcctgatcgacctgcaggagctgggcaagtacgagca |
| | | gtacatcaagtggccctggtacatctggctgggctttattgccggcctgatcgccatcgtgatggtgaccatcatgctgtgctgtatgacaagctgttgcagttgcctgaagggct |
| | | gctgcagctgcggcagctgctgcaagttcgacgaggacgacagcgagcccgtgctgaagggcgtgaagctgcactacacc |
| 233 | 2A0620 | atgttcgtgttcctggtgctgctccccctggtgagctcccagtgcgtcaacctgaccacacggacccagctgccccccgcctataccaacagcttcacccgcggcgtctactac |
| | | cccgacaaggtgttccggagcagcgtgctgcacagcacccaggacctcttcctccccttttttagcaacgtgacctggttccacgccatccacgtgagtggcaccaacggca |
| | | ccaagcggttcgccaaccctgtgctccccttcaacgacggcgtgtacttcgctagcacagaaaaaagtaacatcattcggggctggatcttcggcaccacactggatagcaa |
| | | aacccagagcctgctgattgtgaataacgccaccaacgtggtgatcaaggtgtgcgagttccagttctgcaacgaccccttcctgggcgtgtactaccacaagaacaacaa |
| | | gagctggatggagagcgagttccgcgtgtatagctctgccaacaactgcaccttcgagtacgtgagccagcccttcctgatggacctggagggcaagcagggcaatttcaa |
| | | aaacctgcgggagttcgtgttcaagaacatcgacggctacttcaagatctacagcaagcacacccccatcaacctggtgcggggcctgccccagggctttagcgctctgga |
| | | gcccctggtggacctgcccatcggcatcaacatcacccgcttccaaaccctgttggccctgcaccggagctacctgacccctggcgatagcagtagtggctggacagccgg |
| | | agccgccgcctactacgtgggatacctgcagccccggaccttcctgctgaagtacaacgagaacggcacaatcacagacgccgtggactgcgccctggaccccctgagc |
| | | gaaacaaagtgcaccctcaaaagtttcaccgtggagaagggcatctaccagaccagcaacttccgggtgcagcccaccgagagcatcgtgcggttccccaacatcacca |
| | | acctgtgccccttcggcgaggtgttcaacgccacccggttcgccagcgtgtacgcctggaaccggaagcggatcagcaactgcgtggccgactacagcgtgctgtataaca |
| | | gtgccagcttcagcaccttcaagtgctacggcgtgagccccaccaagctgaacgacctgtgcttcaccaacgtgtacgccgacagcttcgtgatccggggcgacgaggtgc |
| | | ggcagatcgcccccggccagaccggcaatattgctgactataactataagctgcccgacgatttcaccggctgcgtgatcgcctggaacagcaacaacctggacagcaag |
| | | gtgggcggaaactacaactacctgtaccggctgttccgcaaaagtaacctcaagcctttcgagcgggacatcagcaccgagatctaccaggccggcagtaccccttgcaa |
| | | cggcgtgaagggcttcaactgctacttccccctgcagagctacggcttccagcccacctacggcgtgggctaccagccctaccgggtggtggttctgagcttcgagctgctgc |
| | | acgcccctgccaccgtgtgcggccccaagaaaagcaccaacctggtgaagaacaagtgcgtgaacttcaactttaacggactgacaggcaccggcgtgctgaccgaga |
| | | gcaacaagaagttcctgcccttccagcaattcggccgggatattgccgacaccactgacgccgtgcgggacccccagaccctggagatcctggacatcacaccctgtagct |
| | | tcggcggcgtgagcgtgatcacccccggcaccaacaccagcaaccaggtggccgtgctctaccaaggcgtgaactgcaccgaggtgcccgtggccatccacgccgacc |
| | | agctgacccccacctggcgggtgtacagcaccggcagcaacgtgttccagacccgggccggctgcctgatcggcgccgagcacgtgaataacagctacgagtgcgaca |
| | | tccccatcggagccggaatctgcgccagctaccagacccagaccaacagcccccggagagcccggagcgtggccagccagagcattattgcctacaccatgagcctgg |
| | | gcgtggagaacagcgtggcctacagcaacaatagtattgccatccccaccaacttcaccatcagcgtgaccaccgaaatcctccccgtgagcatgaccaagaccagcgt |
| | | ggactgcaccatgtacatctgcggcgacagcaccgagtgcagcaacctgctcctgcagtacggcagcttctgcacccagctgaaccgggccctgaccggaattgccgtgg |
| | | agcaggacaagaacacccaggaggtgttcgcccaggtgaagcagattacaagacacctcccatcaaggacttcgggggttcaacttcagccagatcctgcccgaccc |
| | | cagcaagcccagcaagcggagcttcatcgaggacctgttgttcaacaaggtgaccctggccgacgccggcttcatcaagcagtacggcgactgtctgggagatattgccg |
| | | cacgggacctgatctgcgcccagaagttcaacggcctgaccgtgctgcccccactgctgaccgacgagatgatcgcccagtacacaagcgctctgctcgccggcaccatc |
| | | accagcggctggaccttcggcgccggcgctgccctgcagatccccttcgccatgcagatggcctaccggttcaacggcatcggcgtgacccagaacgtgctgtacgagaa |
| | | ccagaagctgatcgccaaccagttcaacagcgccatcggcaagatccaggacagcctgagctccaccgccagcgccctgggcaagctgcaggacgtggtgaaccaga |
| | | acgcccaggccctgaacaccctggtgaagcagctgagcagcaacttcggcgccatcagctctgtgctgaacgacatcctgagccggctggatcctcctgaggccgaggtg |
| | | caaatcgatcggctcatcaccggccggctgcagagcctgcagacctacgtgacacagcagctgatccgggccgccgagatccgggccagcgccaacctggccgctacc |
| | | aagatgagcgagtgcgtgctgggccagagcaagcgggtggacttctgcggcaagggctaccacctgatgagcttcccccagagcgccccccacggcgtggtgttcctgca |
| | | cgtgacctacgtgcccgcccaggagaagaacttcaccaccgcccccgccatctgccacgacggcaaggcccacttcccccgggagggcgtgttcgtgagcaacggcac |
| | | ccactggttcgtgacccagcggaacttctacgagccccagatcataaccacagacaacaccttcgtgagcggcaactgcgacgtggtcatcggcatcgtgaacaacaccg |
| | | tgtacgaccccctgcagcccgagctggacagcttcaaggaggaactggacaagtacttcaagaaccacaccagccccgacgtggacctgggcgacatcagcggcatca |
| | | acgccagcgtggtgaacatccagaaggagatcgaccggctgaacgaggtggccaagaacctgaacgagagcctgatcgacctgcaggagctgggcaagtacgagca |
| | | gtacatcaagtggccctggtacatctggctgggctttattgccggcctgatcgccatcgtgatggtgaccatcatgctgtgctgtatgacaagctgttgcagttgcctgaagggct |
| | | gctgcagctgcggcagctgctgcaagttcgacgaggacgacagcgagcccgtgctgaagggcgtgaagctgcactacacc |
| 234 | 2A3430 | atgttcgtgttcctggtgctgctccccctggtgagctcccagtgcgtcaacctgaccacacggacccagctgccccccgcctataccaacagcttcacccggggcgtgtactat |
| | | cccgacaaggtgttccggagcagcgtgctgcacagcacccaggacctcttcctccccttttttagcaacgtgacctggttccacgctatcagtggcaccaacggcaccaagc |
| | | ggttcgacaaccctgtgctccccttcaacgacggcgtgtacttcgctagcacagaaaaaagtaacatcattcggggctggatcttcggcaccacactggatagcaaaaccca |
| | | gagcctgctgattgtgaataacgccaccaacgtggtgatcaaggtgtgcgagttccagttctgcaacgaccccttcctgggcgtgtaccacaagaacaacaagagctggatg |
| | | gagagcgagttccgcgtgtatagctctgccaacaactgcaccttcgagtacgtgagccagcccttcctgatggacctggagggcaagcagggcaatttcaaaaacctgcgg |
| | | gagttcgtgttcaagaacatcgacggctacttcaagatctacagcaagcacacccccatcaacctggtgcgggacctgccccagggctttagcgctctggagcccctggtgg |
| | | acctgcccatcggcatcaacatcacccgcttccaaaccctgttggccctgcaccggagctacctgacccctggcgatagcagtagtggctggacagccggagccgccgcct |
| | | actacgtgggatacctgcagccccggaccttcctgctgaagtacaacgagaacggcacaatcacagacgccgtggactgcgccctggaccccctgagcgaaacaaagt |
| | | gcaccctcaaaagtttcaccgtggagaagggcatctaccagaccagcaacttccgggtgcagcccaccgagagcatcgtgcggttccccaacatcaccaacctgtgcccc |
| | | ttcggcgaggtgttcaacgccacccggttcgccagcgtgtacgcctggaaccggaagcggatcagcaactgcgtggccgactacagcgtgctgtataacagtgccagcttc |
| | | agcaccttcaagtgctacggcgtgagccccaccaagctgaacgacctgtgcttcaccaacgtgtacgccgacagcttcgtgatccggggcgacgaggtgcggcagatcgc |
| | | ccccggccagaccggcaagatcgccgattacaattacaagctgcccgacgatttcaccggctgcgtgatcgcctggaacagcaacaacctggacagcaaggtgggcgg |
| | | aaactacaactacctgtaccggctgttccgcaaaagtaacctgaagcccttcgagcgggacatcagcaccgagatctaccaggccggcagtaccccttgcaacggcgtgg |
| | | agggcttcaactgctacttccccctgcagagctacggcttccagcccacctacggcgtgggctaccagccctaccgggtggtggttctgagcttcgagctgctgcacgcccct |
| | | gccaccgtgtgcggccccaagaaaagcaccaacctggtgaagaacaagtgcgtgaacttcaactttaacggactgacaggcaccggcgtgctgaccgagagcaacaa |
| | | gaagttcctgcccttccagcaattcggccgggacatcgacgacaccactgacgccgtggggacccccagaccctggagatcctggacatcacaccctgtagcttcggcg |
| | | gcgtgagcgtgatcacccccggcaccaacaccagcaaccaggtggccgtgctctaccaaggcgtgaactgcaccgaggtgcccgtggccatccacgccgaccagctga |
| | | cccccacctggcgggtgtacagcaccggcagcaacgtgttccagacccgggccggctgcctgatcggcgccgagcacgtgaataacagctacgagtgcgacatccccat |
| | | cggagccggaatctgcgccagctaccagacccagaccaacagccaccggagagcccggagcgtggccagccagagcattattgcctacaccatgagcctgggcgccg |
| | | agaacagcgtggcctacagcaacaatagtattgccatccccaccaacttcaccatcagcgtgaccaccgaaatcctccccgtgagcatgaccaagaccagcgtggactgc |
| | | accatgtacatctgcggcgacagcaccgagtgcagcaacctgctcctgcagtacggcagcttctgcatccagctgaaccgggccctgaccggaattgccgtggagcagga |
| | | caagaacacccaggaggtgttcgcccaggtgaagcagatctacaagacacctcccatcaaggacttcgggggttcaacttcagccagatcctgcccgaccccagcaag |
| | | cccagcaagcggagcttcatcgaggacctgttgttcaacaaggtgaccctggccgacgccggcttcatcaagcagtacggcgactgtctgggagatattgccgcacggga |
| | | cctgatctgcgcccagaagttcaacggcctgaccgtgctgcccccactgctgaccgacgagatgatcgcccagtacacaagcgctctgctcgccggcaccatcaccagcg |
| | | gctggaccttcggcgccggcgctgccctgcagatccccttcgccatgcagatggcctaccggttcaacggcatcggcgtgacccagaacgtgctgtacgagaaccagaag |
| | | ctgatcgccaaccagttcaacagcgccatcggcaagatccaggacagcctgagctccaccgccagcgccctgggcaagctgcaggacgtggtgaaccagaacgccca |
| | | ggccctgaacaccctggtgaagcagctgagcagcaacttcggcgccatcagctctgtgctgaacgacatcctggcccggctggatcctcctgaggccgaggtgcaaatcg |
| | | atcggctcatcaccggccggctgcagagcctgcagacctacgtgacacagcagctgatccgggccgccgagatccgggccagcgccaacctggccgctaccaagatga |
| | | gcgagtgcgtgctgggccagagcaagcgggtggacttctgcggcaagggctaccacctgatgagcttcccccagagcgccccccacggcgtggtgttcctgcacgtgacc |
| | | tacgtgcccgcccaggagaagaacttcaccaccgcccccgccatctgccacgacggcaaggcccacttcccccgggagggcgtgttcgtgagcaacggcacccactggt |
| | | tcgtgacccagcggaacttctacgagccccagatcataaccacacacaacaccttcgtgagcggcaactgcgacgtggtcatcggcatcgtgaacaacaccgtgtacgac |
| | | cccctgcagcccgagctggacagcttcaaggaggaactggacaagtacttcaagaaccacaccagccccgacgtggacctgggcgacatcagcggcatcaacgccag |
| | | cgtggtgaacatccagaaggagatcgaccggctgaacgaggtggccaagaacctgaacgagagcctgatcgacctgcaggagctgggcaagtacgagcagtacatca |
| | | agtggccctggtacatctggctgggctttattgccggcctgatcgccatcgtgatggtgaccatcatgctgtgctgtatgacaagctgttgcagttgcctgaagggctgctgcagct |
| | | gcggcagctgctgcaagttcgacgaggacgacagcgagcccgtgctgaagggcgtgaagctgcactacacc |
| 235 | 2A8210 | atgggcgtcaaggtcctgttcgccctgatctgtattgccgtggccgaggccaagcgggtgcagcccaccgagagcatcgtgcggttccccaacatcaccaacctgtgcccctt |
| | | cggcgaggtgttcaacgccacccggttcgccagcgtgtacgcctggaaccggaagcggatcagcaactgcgtggccgactacagcgtgctgtacaacagcgccagcttc |
| | | agcaccttcaagtgctacggcgtgagccccaccaagctgaacgacctgtgcttcaccaacgtgtacgccgacagcttcgtgatccggggcgacgaggtgcggcagatcgc |
| | | ccccggccagacaggcaacattgctgattacaattacaagctgcccgacgatttcaccggctgcgtgatcgcctggaacagcaacaatctggacagcaaggtgggcgga |
| | | aactacaactacctgtaccggctgttccgcaaaagtaacctcaagcctttcgagcgggacatcagcaccgagatctaccaggccggcagcaccccctgcaacggcgtga |
| | | agggcttcaactgctacttccccctgcagagctacggcttccagcccacctacggcgtgggctaccagccctaccgggtggtcgtgctgagcttcgagctgctccacgccccc |
| | | gccaccgtgtgcggccccaagaaaagcaccaacctggtgaagaacaagtgcgtgaacttc |
| 236 | 2A9200 | atgttcgtgttcctggtgctgctccccctggtgagctcccagtgcgtcaactttaccacccggacccagctgccccccgcctataccaacagcttcacccgcggcgtctactacc |
| | | ccgacaaggtgttccggagcagcgtgctgcacagcacccaggacctcttcctccccttttttagcaacgtgacctggttccacgccatccacgtgagtggcaccaacggcac |
| | | caagcggttcgccaaccctgtgctccccttcaacgacggcgtgtacttcgctagcacagaaaaaagtaacatcattcggggctggatcttcggcaccacactggatagcaaa |
| | | acccagagcctgctgattgtgaataacgccaccaacgtggtgatcaaggtgtgcgagttccagttctgcaacgaccccttcctgggcgtgtactaccacaagaacaacaag |
| | | agctggatggagagcgagttccgcgtgtatagctctgccaacaactgcaccttcgagtacgtgagccagcccttcctgatggacctggagggcaagcagggcaatttcaaa |
| | | aacctgcgggagttcgtgttcaagaacatcgacggctacttcaagatctacagcaagcacacccccatcaacctggtgcggggcctgccccagggctttagcgctctggag |
| | | cccctggtggacctgcccatcggcatcaacatcacccgcttccaaaccctgcacatcagctacctgacccctggcgatagcagtagtggctggacagccggagccgccgc |
| | | ctactacgtgggatacctgcagccccggaccttcctgttgaagtacaacgagaacggcacaatcacagacgccgtggactgcgccctggaccccctgagcgaaacaaag |
| | | tgcaccctcaaaagtttcaccgtggagaagggcatctaccagaccagcaacttccgggtgcagcccaccgagagcatcgtgcggttccccaacatcaccaacctgtgccc |
| | | cttcggcgaggtgttcaacgccacccggttcgccagcgtgtacgcctggaaccggaagcggatcagcaactgcgtggccgactacagcgtgctgtataacagtgccagctt |
| | | cagcaccttcaagtgctacggcgtgagccccaccaagctgaacgacctgtgcttcaccaacgtgtacgccgacagcttcgtgatccggggcgacgaggtgcggcagatcg |
| | | cccccggccagaccggcaatattgctgactataactataagctgcccgacgatttcaccggctgcgtgatcgcctggaacagcaacaacctggacagcaaggtgggcgga |
| | | aactacaactacctgtaccggctgttccgcaaaagtaacctcaagcctttcgagcgggacatcagcaccgagatctaccaggccggcagtaccccttgcaacggcgtgaa |
| | | gggcttcaactgctacttccccctgcagagctacggcttccagcccacctacggcgtgggctaccagccctaccgggtggtggttctgagcttcgagctgctgcacgcccctg |
| | | ccaccgtgtgcggccccaagaaaagcaccaacctggtgaagaacaagtgcgtgaacttcaactttaacggactgacaggcaccggcgtgctgaccgagagcaacaag |
| | | aagttcctgcccttccagcaattcggccgggatattgccgacaccactgacgccgtgcgggacccccagaccctggagatcctggacatcacaccctgtagcttcggcggc |
| | | gtgagcgtgatcacccccggcaccaacaccagcaaccaggtggccgtgctctaccaaggcgtgaactgcaccgaggtgcccgtggccatccacgccgaccagctgacc |
| | | cccacctggcgggtgtacagcaccggcagcaacgtgttccagacccgggccggctgcctgatcggcgccgagcacgtgaataacagctacgagtgcgacatccccatcg |
| | | gagccggaatctgcgccagctaccagacccagaccaacagcccccggagagcccggagcgtggccagccagagcattattgcctacaccatgagcctgggcgtggag |
| | | aacagcgtggcctacagcaacaatagtattgccatccccaccaacttcaccatcagcgtgaccaccgaaatcctccccgtgagcatgaccaagaccagcgtggactgcac |
| | | catgtacatctgcggcgacagcaccgagtgcagcaacctgctgctccagtacggcagcttctgcacccagctgaaccgggccctgaccggaattgccgtggagcaggac |
| | | aagaacacccaggaggtgttcgcccaggtgaagcagattacaagacacctcccatcaaggacttcgggggttcaacttcagccagatcctgcccgaccccagcaagc |
| | | ccagcaagcggagcttcatcgaggacctgctgttcaacaaggtgaccctggccgacgccggcttcatcaagcagtacggcgactgtctgggagatattgccgcacgggac |
| | | ctgatctgcgcccagaagttcaacggcctgaccgtgctgcccccactgttgaccgacgagatgatcgcccagtacacaagcgctctgctggccggcaccatcaccagcgg |
| | | ctggaccttcggcgccggcgctgccctgcagatccccttcgccatgcagatggcctaccggttcaacggcatcggcgtgacccagaacgtgctgtacgagaaccagaagct |
| | | gatcgccaaccagttcaacagcgccatcggcaagatccaggacagcctgagctccaccgccagcgccctgggcaagctgcaggacgtggtgaaccagaacgcccag |
| | | gccctgaacaccctggtgaagcagctgagcagcaacttcggcgccatcagctctgtgctgaacgacatcctgagccggctggatcctcctgaggccgaggtgcaaatcgat |
| | | cggctcatcaccggccggctgcagagcctgcagacctacgtgacacagcagctgatccgggccgccgagatccgggccagcgccaacctggccgctaccaagatgag |
| | | cgagtgcgtgctgggccagagcaagcgggtggacttctgcggcaagggctaccacctgatgagcttcccccagagcgccccccacggcgtggtgttcctgcacgtgacct |
| | | acgtgcccgcccaggagaagaacttcaccaccgcccccgccatctgccacgacggcaaggcccacttcccccgggagggcgtgttcgtgagcaacggcacccactggtt |
| | | cgtgacccagcggaacttctacgagccccagatcataaccacagacaacaccttcgtgagcggcaactgcgacgtggtcatcggcatcgtgaacaacaccgtgtacgac |
| | | cccctgcagcccgagctggacagcttcaaggaggaactggacaagtacttcaagaaccacaccagccccgacgtggacctgggcgacatcagcggcatcaacgccag |
| | | cgtggtgaacatccagaaggagatcgaccggctgaacgaggtggccaagaacctgaacgagagcctgatcgacctgcaggagctgggcaagtacgagcagtacatca |
| | | agtggccctggtacatctggctgggctttattgccggcctgatcgccatcgtgatggtgaccatcatgctgtgctgtatgacaagctgttgcagttgcctgaagggctgctgcagct |
| | | gcggcagctgctgcaagttcgacgaggacgacagcgagcccgtgctgaagggcgtgaagctgcactacacc |
| 237 | 2A7020 | ATGTTCGTGTTCCTGGTGCTGCTGCCTCTGGTGTCCAGCCAGTGTGTGAACCTGACCACCAGAACACAGCTGCCTCC |
| | | AGCCTACACCAACAGCTTTACCAGAGGCGTGTACTACCCCGACAAGGTGTTCAGATCCAGCGTGCTGCACTCTACCC |
| | | AGGACCTGTTCCTGCCTTTCTTCAGCAACGTGACCTGGTTCCACGCCATCCACGTGTCCGGCACCAATGGCACCAAG |
| | | AGATTCGACAACCCCGTGCTGCCCTTCAACGACGGGGTGTACTTTGCCAGCACCGAGAAGTCCAACATCATCAGAGG |
| | | CTGGATCTTCGGCACCACACTGGACAGCAAGACCCAGAGCCTGCTGATCGTGAACAACGCCACCAACGTGGTCATCA |
| | | AAGTGTGCGAGTTCCAGTTCTGCAACGACCCCTTCCTGGGCGTCTACTACCACAAGAACAACAAGAGCTGGATGGAA |
| | | AGCGAGTTCCGGGTGTACAGCAGCGCCAACAACTGCACCTTCGAGTACGTGTCCCAGCCTTTCCTGATGGACCTGGA |
| | | AGGCAAGCAGGGCAACTTCAAGAACCTGCGCGAGTTCGTGTTTAAGAACATCGACGGCTACTTCAAGATCTACAGCA |
| | | AGCACACCCCTATCAACCTCGTGCGGGATCTGCCTCAGGGCTTCTCTGCTCTGGAACCCCTGGTGGATCTGCCCATC |
| | | GGCATCAACATCACCCGGTTTCAGACACTGCTGGCCCTGCACAGAAGCTACCTGACACCTGGCGATAGCAGCAGCG |
| | | GATGGACAGCTGGTGCCGCCGCTTACTATGTGGGCTACCTGCAGCCTAGAACCTTCCTGCTGAAGTACAACGAGAAC |
| | | GGCACCATCACCGACGCCGTGGATTGTGCTCTGGATCCTCTGAGCGAGACAAAGTGCACCCTGAAGTCCTTCACCGT |
| | | GGAAAAGGGCATCTACCAGACCAGCAACTTCCGGGTGCAGCCCACCGAATCCATCGTGCGGTTCCCCAATATCACCA |
| | | ATCTGTGCCCCTTCGGCGAGGTGTTCAATGCCACCAGATTCGCCTCTGTGTACGCCTGGAACCGGAAGCGGATCAGC |
| | | AATTGCGTGGCCGACTACTCCGTGCTGTACAACTCCGCCAGCTTCAGCACCTTCAAGTGCTACGGCGTGTCCCCTAC |
| | | CAAGCTGAACGACCTGTGCTTCACAAACGTGTACGCCGACAGCTTCGTGATCCGGGGAGATGAAGTGCGGCAGATTG |
| | | CCCCTGGACAGACAGGCAAGATCGCCGACTACAACTACAAGCTGCCCGACGACTTCACCGGCTGTGTGATTGCCTG |
| | | GAACAGCAACAACCTGGACTCCAAAGTCGGCGGCAACTACAATTACCTGTACCGGCTGTTCCGGAAGTCCAATCTGA |
| | | AGCCCTTCGAGCGGGACATCTCCACCGAGATCTATCAGGCCGGCAGCACCCCTTGTAACGGCGTGGAAGGCTTCAA |
| | | CTGCTACTTCCCACTGCAGTCCTACGGCTTTCAGCCCACAAATGGCGTGGGCTATCAGCCCTACAGAGTGGTGGTGC |
| | | TGAGCTTCGAACTGCTGCATGCCCCTGCCACAGTGTGCGGCCCTAAGAAAAGCACCAATCTCGTGAAGAACAAATGC |
| | | GTGAACTTCAACTTCAACGGCCTGACCGGCACCGGCGTGCTGACAGAGAGCAACAAGAAGTTCCTGCCATTCCAGCA |
| | | GTTTGGCCGGGATATCGCCGATACCACAGACGCCGTTAGAGATCCCCAGACACTGGAAATCCTGGACATCACCCCTT |
| | | GCAGCTTCGGCGGAGTGTCTGTGATCACCCCTGGCACCAACACCAGCAATCAGGTGGCAGTGCTGTACCAGGACGT |
| | | GAACTGTACCGAAGTGCCCGTGGCCATTCACGCCGATCAGCTGACACCTACATGGCGGGTGTACTCCACCGGCAGC |
| | | AATGTGTTTCAGACCAGAGCCGGCTGTCTGATCGGAGCCGAGCACGTGAACAATAGCTACGAGTGCGACATCCCCAT |
| | | CGGCGCTGGAATCTGCGCCAGCTACCAGACACAGACAAACAGCCCTCGGAGAGCCAGAAGCGTGGCCAGCCAGAG |
| | | CATCATTGCCTACACAATGTCTCTGGGCGCCGAGAACAGCGTGGCCTACTCCAACAACTCTATCGCTATCCCCACCAA |
| | | CTTCACCATCAGCGTGACCACAGAGATCCTGCCTGTGTCCATGACCAAGACCAGCGTGGACTGCACCATGTACATCT |
| | | GCGGCGATTCCACCGAGTGCTCCAACCTGCTGCTGCAGTACGGCAGCTTCTGCACCCAGCTGAATAGAGCCCTGAC |
| | | AGGGATCGCCGTGGAACAGGACAAGAACACCCAAGAGGTGTTCGCCCAAGTGAAGCAGATCTACAAGACCCCTCCTA |
| | | TCAAGGACTTCGGCGGCTTCAATTTCAGCCAGATTCTGCCCGATCCTAGCAAGCCCAGCAAGCGGAGCTTCATCGAG |
| | | GACCTGCTGTTCAACAAAGTGACACTGGCCGACGCCGGCTTCATCAAGCAGTATGGCGATTGTCTGGGCGACATTGC |
| | | CGCCAGGGATCTGATTTGCGCCCAGAAGTTTAACGGACTGACAGTGCTGCCTCCTCTGCTGACCGATGAGATGATCG |
| | | CCCAGTACACATCTGCCCTGCTGGCCGGCACAATCACAAGCGGCTGGACATTTGGAGCAGGCGCCGCTCTGCAGAT |
| | | CCCCTTTGCTATGCAGATGGCCTACCGGTTCAACGGCATCGGAGTGACCCAGAATGTGCTGTACGAGAACCAGAAGC |
| | | TGATCGCCAACCAGTTCAACAGCGCCATCGGCAAGATCCAGGACAGCCTGAGCAGCACAGCAAGCGCCCTGGGAAA |
| | | GCTGCAGGACGTGGTCAACCAGAATGCCCAGGCACTGAACACCCTGGTCAAGCAGCTGTCCTCCAACTTCGGCGCC |
| | | ATCAGCTCTGTGCTGAACGATATCCTGAGCAGACTGGACCCTCCTGAGGCCGAGGTGCAGATCGACAGACTGATCAC |
| | | AGGCAGACTGCAGAGCCTCCAGACATACGTGACCCAGCAGCTGATCAGAGCCGCCGAGATTAGAGCCTCTGCCAAT |
| | | CTGGCCGCCACCAAGATGTCTGAGTGTGTGCTGGGCCAGAGCAAGAGAGTGGACTTTTGCGGCAAGGGCTACCACC |
| | | TGATGAGCTTCCCTCAGTCTGCCCCTCACGGCGTGGTGTTTCTGCACGTGACATATGTGCCCGCTCAAGAGAAGAAT |
| | | TTCACCACCGCTCCAGCCATCTGCCACGACGGCAAAGCCCACTTTCCTAGAGAAGGCGTGTTCGTGTCCAACGGCAC |
| | | CCATTGGTTCGTGACACAGCGGAACTTCTACGAGCCCCAGATCATCACCACCGACAACACCTTCGTGTCTGGCAACT |
| | | GCGACGTCGTGATCGGCATTGTGAACAATACCGTGTACGACCCTCTGCAGCCCGAGCTGGACAGCTTCAAAGAGGAA |
| | | CTGGACAAGTACTTTAAGAACCACACAAGCCCCGACGTGGACCTGGGCGATATCAGCGGAATCAATGCCAGCGTCGT |
| | | GAACATCCAGAAAGAGATCGACCGGCTGAACGAGGTGGCCAAGAATCTGAACGAGAGCCTGATCGACCTGCAAGAA |
| | | CTGGGGAAGTACGAGCAGTACATCAAGTGGCCCTGGTACATCTGGCTGGGCTTTATCGCCGGACTGATTGCCATCGT |
| | | GATGGTCACAATCATGCTGTGTTGCATGACCAGCTGCTGTAGCTGCCTGAAGGGCTGTTGTAGCTGTGGCAGCTGCT |
| | | GCAAGTTCGACGAGGACGATTCTGAGCCCGTGCTGAAGGGCGTGAAACTGCACTACACA |
| 238 | 2A8620 | atgtttgtttttcttgttttattgccactagtctctagtcagtgtgttaatcttacaaccagaactcaattaccccctgcatacactaattctttcacacgtggtgtttattaccctgacaa |
| | | agttttcagatcctcagttttacattcaactcaggatttgttcttacctttcttttccaatgttacttggttccatgctatacatgtctctgggaccaatggtactaagaggtttgataac |
| | | cctgtcctaccatttaatgatggtgtttattttgcttccactgagaagtctaacataataagaggctggatctttggtactactttagattcgaagacccagtccctacttattgttaataa |
| | | cgctactaatgttgttattaaagtctgtgaatttcaattttgtaatgatccatttttgggtgtttattaccacaaaaacaacaaaagttggatggaaagtgagttcagagtttattctagtg |
| | | cgaataattgcacttttgaatatgtctctcagccttttcttatggaccttgaaggaaaacagggtaatttcaaaaatcttagggaatttgtgtttaagaatattgatggttattttaaaata |
| | | tattctaagcacacgcctattaatttagtgcgtgatctccctcagggtttttcggctttagaaccattggtagatttgccaataggtattaacatcactaggtttcaaactttacttgcttt |
| | | acatagaagttatttgactcctggtgattcttcttcaggttggacagctggtgctgcagcttattatgtgggttatcttcaacctaggacttttctattaaaatataatgaaaatggaacca |
| | | ttacagatgctgtagactgtgcacttgaccctctctcagaaacaaagtgtacgttgaaatccttcactgtagaaaaaggaatctatcaaacttctaactttagagtccaaccaacaga |
| | | atctattgttagatttcctaatattacaaacttgtgcccttttggtgaagtttttaacgccaccagatttgcatccgtgtatgcttggaacaggaagagaatcagcaactgtgttgctga |
| | | ttattctgtcctatataattccgcatcattttccacttttaagtgttatggagtgtctcctactaaattaaatgatctctgctttactaatgtctatgcagattcatttgtaattagaggtg |
| | | atgaagtcagacaaatcgctccagggcaaactggaaagattgctgattataattataaattaccagatgattttacaggctgcgttatagcttggaattctaacaatcttgattctaaggtt |
| | | ggtggtaattataattacctgtatagattgtttaggaagtctaatctcaaaccttttgagagagatatttcaactgaaatctatcaggccggtagcacaccttgtaatggtgttgaag |
| | | gttttaattgttactttcctttacaatcatatggtttccaacccactaatggtgttggttaccaaccatacagagtagtagtactttcttttgaacttctacatgcaccagcaactgtttgt |
| | | ggacctaaaaagtctactaatttggttaaaaacaaatgtgtcaatttcaacttcaatggtttaacaggcacaggtgttcttactgagtctaacaaaaagtttctgcctttccaacaattt |
| | | ggcagagacattgctgacactactgatgctgtccgtgatccacagacacttgagattcttgacattacaccatgttcttttggtggtgtcagtgttataacaccaggaacaaatact |
| | | tctaaccaggttgctgttctttatcaggatgttaactgcacagaagtccctgttgctattcatgcagatcaacttactcctacttggcgtgtttattctacaggttctaatgtttttcaaac |
| | | acgtgcaggctgtttaataggggctgaacatgtcaacaactcatatgagtgtgacatacccattggtgcaggtatatgcgctagttatcagactcagactaattctcctcggcggg |
| | | cacgtagtgtagctagtcaatccatcattgcctacactatgtcacttggtgcagaaaattcagttgcttactctaataactctattgccatacccacaaattttactattagtgttacca |
| | | cagaaattctaccagtgtctatgaccaagacatcagtagattgtacaatgtacatttgtggtgattcaactgaatgcagcaatcttttgttgcaatatggcagtttttgtacacaatta |
| | | aaccgtgctttaactgggatagctgttgaacaagacaaaaacacccaagaagtttttgcacaagtcaaacaaatttacaaaacaccaccaattaaagattttggtggttttaatt |
| | | tttcacaaatattaccagatccatcaaaaccaagcaagaggtcatttattgaagatctacttttcaacaaagtgacacttgcagatgctggcttcatcaaacaatatggtgattgc |
| | | cttggtgatattgctgctagggacctcatttgtgcacaaaagtttaacggccttactgttttgccacctttgctcacagatgaaatgattgctcaatacacttctgcactgttagcgggt |
| | | acaatcacttctggttggacctttggtgcaggtgctgcattacaaataccatttgctatgcaaatggcttataggtttaatggtattggagttacacagaatgttctctatgagaacca |
| | | aaaattgattgccaaccaatttaatagtgccattggcaaaattcaagactcactttcttccacagcaagtgcacttggaaaacttcaagatgtggtcaaccaaaatgcacaagc |
| | | tttaaacacgcttgttaaacaacttagctccaattttggtgcaatttcaagtgttttaaatgatatcctttcacgtcttgaccctcccgaggctgaagtgcaaattgataggttgatcac |
| | | aggcagacttcaaagtttgcagacatatgtgactcaacaattaattagagctgcagaaatcagagcttctgctaatcttgctgctactaaaatgtcagagtgtgtacttggacaat |
| | | caaaaagagttgatttttgtggaaagggctatcatcttatgtccttccctcagtcagcacctcatggtgtagtcttcttgcatgtgacttatgtccctgcacaagaaaagaacttcac |
| | | aactgctcctgccatttgtcatgatggaaaagcacactttcctcgtgaaggtgtctttgtttcaaatggcacacactggtttgtaacacaaaggaatttttatgaaccacaaatcatt |
| | | actacagacaacacatttgtgtctggtaactgtgatgttgtaataggaattgtcaacaacacagtttatgatcctttgcaacctgaattagactcattcaaggaggagttagataaa |
| | | tattttaagaatcatacatcaccagatgttgatttaggtgacatctctggcattaatgcttcagttgtaaacattcaaaaagaaattgaccgcctcaatgaggttgccaagaatttaa |
| | | atgaatctctcatcgatctccaagaacttggaaagtatgagcagtatataaaatggccatggtacatttggctaggttttatagctggcttgattgccatagtaatggtgacaattat |
| | | gctttgctgtatgaccagttgctgtagttgtctcaagggctgttgttcttgtggatcctgctgcaaatttgatgaagacgactctgagccagtgctcaaaggagtcaaattacattac |
| | | aca |
| 239 | 2A9420 | ATGTTCGTGTTCCTGGTGCTGCTGCCTCTGGTGTCCAGCCAGTGTGTGAACCTGACCACCAGAACACAGCTGCCTCC |
| | | AGCCTACACCAACAGCTTTACCAGAGGCGTGTACTACCCCGACAAGGTGTTCAGATCCAGCGTGCTGCACTCTACCC |
| | | AGGACCTGTTCCTGCCTTTCTTCAGCAACGTGACCTGGTTCCACGCCATCCACGTGTCCGGCACCAACGGCACCAAG |
| | | AGATTCGACAACCCCGTGCTGCCCTTCAACGACGGGGTGTACTTTGCCAGCACCGAGAAGTCCAACATCATCAGAGG |
| | | CTGGATCTTCGGCACCACACTGGACAGCAAGACCCAGAGCCTGCTGATCGTGAACAACGCCACCAACGTGGTCATCA |
| | | AAGTGTGCGAGTTCCAGTTCTGCAACGACCCCTTCCTGGGCGTCTACTACCACAAGAACAACAAGAGCTGGATGGAA |
| | | AGCGAGTTCCGGGTGTACAGCAGCGCCAACAACTGCACCTTCGAGTACGTGTCCCAGCCTTTCCTGATGGACCTGGA |
| | | AGGCAAGCAGGGCAACTTCAAGAACCTGCGCGAGTTCGTGTTTAAGAACATCGACGGCTACTTCAAGATCTACAGCA |
| | | AGCACACCCCTATCAACCTCGTGCGGGATCTGCCTCAGGGCTTCTCTGCTCTGGAACCCCTGGTGGATCTGCCCATC |
| | | GGCATCAACATCACCCGGTTTCAGACACTGCTGGCCCTGCACAGAAGCTACCTGACACCTGGCGATAGCAGCAGCG |
| | | GCTGGACAGCTGGTGCCGCCGCTTACTACGTGGGCTACCTGCAGCCTAGAACCTTCCTGCTGAAGTACAACGAGAAC |
| | | GGCACCATCACCGACGCCGTGGATTGTGCTCTGGATCCTCTGAGCGAGACAAAGTGCACCCTGAAGTCCTTCACCGT |
| | | GGAAAAGGGCATCTACCAGACCAGCAACTTCCGGGTGCAGCCCACCGAATCCATCGTGCGGTTCCCCAATATCACCA |
| | | ATCTGTGCCCCTTCGGCGAGGTGTTCAACGCCACCAGATTCGCCTCTGTGTACGCCTGGAACCGGAAGCGGATCAG |
| | | CAATTGCGTGGCCGACTACTCCGTGCTGTACAACTCCGCCAGCTTCAGCACCTTCAAGTGCTACGGCGTGTCCCCTA |
| | | CCAAGCTGAACGACCTGTGCTTCACAAACGTGTACGCCGACAGCTTCGTGATCCGGGGAGACGAAGTGCGGCAGAT |
| | | TGCCCCTGGACAGACAGGCAAGATCGCCGACTACAACTACAAGCTGCCCGACGACTTCACCGGCTGTGTGATTGCCT |
| | | GGAACAGCAACAACCTGGACTCCAAAGTCGGCGGCAACTACAATTACCTGTACCGGCTGTTCCGGAAGTCCAATCTG |
| | | AAGCCCTTCGAGCGGGACATCTCCACCGAGATCTATCAGGCCGGCAGCACCCCTTGTAACGGCGTGGAAGGCTTCA |
| | | ACTGCTACTTCCCACTGCAGTCCTACGGCTTTCAGCCCACAAACGGCGTGGGCTATCAGCCCTACAGAGTGGTGGTG |
| | | CTGAGCTTCGAACTGCTGCACGCCCCTGCCACAGTGTGCGGCCCTAAGAAAAGCACCAATCTCGTGAAGAACAAGTG |
| | | CGTGAACTTCAACTTCAACGGCCTGACCGGCACCGGCGTGCTGACAGAGAGCAACAAGAAGTTCCTGCCATTCCAGC |
| | | AGTTTGGCCGGGATATCGCCGATACCACAGACGCCGTTAGAGATCCCCAGACACTGGAAATCCTGGACATCACCCCT |
| | | TGCAGCTTCGGCGGAGTGTCTGTGATCACCCCTGGCACCAACACCAGCAATCAGGTGGCAGTGCTGTACCAGGACG |
| | | TGAACTGTACCGAAGTGCCCGTGGCCATTCACGCCGATCAGCTGACACCTACCTGGCGGGTGTACTCCACCGGCAG |
| | | CAACGTGTTTCAGACCAGAGCCGGCTGTCTGATCGGAGCCGAGCACGTGAACAATAGCTACGAGTGCGACATCCCCA |
| | | TCGGCGCTGGAATCTGCGCCAGCTACCAGACACAGACAAACAGCCCTCGGAGAGCCAGAAGCGTGGCCAGCCAGAG |
| | | CATCATTGCCTACACAATGTCTCTGGGCGCCGAGAACAGCGTGGCCTACTCCAACAACTCTATCGCTATCCCCACCAA |
| | | CTTCACCATCAGCGTGACCACAGAGATCCTGCCTGTGTCCATGACCAAGACCAGCGTGGACTGCACCATGTACATCT |
| | | GCGGCGATTCCACCGAGTGCTCCAACCTGCTGCTGCAGTACGGCAGCTTCTGCACCCAGCTGAATAGAGCCCTGAC |
| | | AGGGATCGCCGTGGAACAGGACAAGAACACCCAAGAGGTGTTCGCCCAAGTGAAGCAGATCTACAAGACCCCTCCTA |
| | | TCAAGGACTTCGGCGGCTTCAATTTCAGCCAGATTCTGCCCGATCCTAGCAAGCCCAGCAAGCGGAGCTTCATCGAG |
| | | GACCTGCTGTTCAACAAAGTGACACTGGCCGACGCCGGCTTCATCAAGCAGTACGGCGATTGTCTGGGCGACATTGC |
| | | CGCCAGGGATCTGATTTGCGCCCAGAAGTTTAACGGACTGACAGTGCTGCCTCCTCTGCTGACCGACGAGATGATCG |
| | | CCCAGTACACATCTGCCCTGCTGGCCGGCACAATCACAAGCGGCTGGACATTTGGAGCAGGCGCCGCTCTGCAGAT |
| | | CCCCTTTGCTATGCAGATGGCCTACCGGTTCAACGGCATCGGAGTGACCCAGAACGTGCTGTACGAGAACCAGAAGC |
| | | TGATCGCCAACCAGTTCAACAGCGCCATCGGCAAGATCCAGGACAGCCTGAGCAGCACAGCAAGCGCCCTGGGAAA |
| | | GCTGCAGGACGTGGTCAACCAGAACGCCCAGGCACTGAACACCCTGGTCAAGCAGCTGTCCTCCAACTTCGGCGCC |
| | | ATCAGCTCTGTGCTGAACGATATCCTGAGCAGACTGGACCCTCCTGAGGCCGAGGTGCAGATCGACAGACTGATCAC |
| | | AGGCAGACTGCAGAGCCTCCAGACATACGTGACCCAGCAGCTGATCAGAGCCGCCGAGATTAGAGCCTCTGCCAAT |
| | | CTGGCCGCCACCAAGATGTCTGAGTGTGTGCTGGGCCAGAGCAAGAGAGTGGACTTTTGCGGCAAGGGCTACCACC |
| | | TGATGAGCTTCCCTCAGTCTGCCCCTCACGGCGTGGTGTTTCTGCACGTGACATACGTGCCCGCTCAAGAGAAGAAT |
| | | TTCACCACCGCTCCAGCCATCTGCCACGACGGCAAAGCCCACTTTCCTAGAGAAGGCGTGTTCGTGTCCAACGGCAC |
| | | CCATTGGTTCGTGACACAGCGGAACTTCTACGAGCCCCAGATCATCACCACCGACAACACCTTCGTGTCTGGCAACT |
| | | GCGACGTCGTGATCGGCATTGTGAACAATACCGTGTACGACCCTCTGCAGCCCGAGCTGGACAGCTTCAAAGAGGAA |
| | | CTGGACAAGTACTTTAAGAACCACACAAGCCCCGACGTGGACCTGGGCGATATCAGCGGAATCAACGCCAGCGTCGT |
| | | GAACATCCAGAAAGAGATCGACCGGCTGAACGAGGTGGCCAAGAATCTGAACGAGAGCCTGATCGACCTGCAAGAA |
| | | CTGGGGAAGTACGAGCAGTACATCAAGTGGCCCTGGTACATCTGGCTGGGCTTTATCGCCGGACTGATTGCCATCGT |
| | | GATGGTCACAATCATGCTGTGTTGCATGACCAGCTGCTGTAGCTGCCTGAAGGGCTGTTGTAGCTGTGGCAGCTGCT |
| | | GCAAGTTCGACGAGGACGATTCTGAGCCCGTGCTGAAGGGCGTGAAACTGCACTACACA |
| 240 | 2A4361 | ATGGGAGTCAAAGTTCTGTTTGCCCTGATCTGCATTGCTGTGGCCGAGGCCAAGAGAGTCCAACCAACAGAATCTATT |
| | | GTTAGATTTCCTAATATTACAAACTTGTGCCCTTTTGGTGAAGTTTTTAACGCCACCAGATTTGCATCCGTGTATGCTTG |
| | | GAACAGGAAGAGAATCAGCAACTGTGTTGCTGATTATTCTGTCCTATATAATTCCGCATCATTTTCCACTTTTAAGTGTT |
| | | ATGGAGTGTCTCCTACTAAATTAAATGATCTCTGCTTTACTAATGTCTATGCAGATTCATTTGTAATTAGAGGTGATGAA |
| | | GTCAGACAAATCGCTCCAGGGCAAACTGGAAAGATTGCTGATTATAATTATAAATTACCAGATGATTTTACAGGCTGCG |
| | | TTATAGCTTGGAATTCTAACAATCTTGATTCTAAGGTTGGTGGTAATTATAATTACCTGTATAGATTGTTTAGGAAGTCT |
| | | AATCTCAAACCTTTTGAGAGAGATATTTCAACTGAAATCTATCAGGCCGGTAGCACACCTTGTAATGGTGTTGAAGGTT |
| | | TTAATTGTTACTTTCCTTTACAATCATATGGTTTCCAACCCACTAATGGTGTTGGTTACCAACCATACAGAGTAGTAGTA |
| | | CTTTCTTTTGAACTTCTACATGCACCAGCAACTGTTTGTGGACCTAAAAAGTCTACTAATTTGGTTAAAAACAAATGTGT |
| | | CAATTTCGGAAGCGGCAGGCTGAGACGAGGCAGCGGCGCCACCAACTTCAGCCTGTTGAAGCAGGCCGGCGACGT |
| | | GGAGGAAAACCCCGGCCCCATGGGAGTCAAAGTTCTGTTTGCCCTGATCTGCATTGCTGTGGCCGAGGCCAAGAGA |
| | | GTCCAACCAACAGAATCTATTGTTAGATTTCCTAATATTACAAACTTGTGCCCTTTTGGTGAAGTTTTTAACGCCACCAG |
| | | ATTTGCATCCGTGTATGCTTGGAACAGGAAGAGAATCAGCAACTGTGTTGCTGATTATTCTGTCCTATATAATTCCGCA |
| | | TCATTTTCCACTTTTAAGTGTTATGGAGTGTCTCCTACTAAATTAAATGATCTCTGCTTTACTAATGTCTATGCAGATTCA |
| | | TTTGTAATTAGAGGTGATGAAGTCAGACAAATCGCTCCAGGGCAAACTGGAAAGATTGCTGATTATAATTATAAATTAC |
| | | CAGATGATTTTACAGGCTGCGTTATAGCTTGGAATTCTAACAATCTTGATTCTAAGGTTGGTGGTAATTATAATTACCTG |
| | | TATAGATTGTTTAGGAAGTCTAATCTCAAACCTTTTGAGAGAGATATTTCAACTGAAATCTATCAGGCCGGTAGCACAC |
| | | CTTGTAATGGTGTTGAAGGTTTTAATTGTTACTTTCCTTTACAATCATATGGTTTCCAACCCACTAATGGTGTTGGTTAC |
| | | CAACCATACAGAGTAGTAGTACTTTCTTTTGAACTTCTACATGCACCAGCAACTGTTTGTGGACCTAAAAAGTCTACTA |
| | | ATTTGGTTAAAAACAAATGTGTCAATTTC |
| 241 | 2A5361 | ATGGGAGTCAAAGTTCTGTTTGCCCTGATCTGCATTGCTGTGGCCGAGGCCAAGAGAGTCCAACCAACAGAATCTATT |
| | | GTTAGATTTCCTAATATTACAAACTTGTGCCCTTTTGGTGAAGTTTTTAACGCCACCAGATTTGCATCCGTGTATGCTTG |
| | | GAACAGGAAGAGAATCAGCAACTGTGTTGCTGATTATTCTGTCCTATATAATTCCGCATCATTTTCCACTTTTAAGTGTT |
| | | ATGGAGTGTCTCCTACTAAATTAAATGATCTCTGCTTTACTAATGTCTATGCAGATTCATTTGTAATTAGAGGTGATGAA |
| | | GTCAGACAAATCGCTCCAGGGCAAACTGGAAAGATTGCTGATTATAATTATAAATTACCAGATGATTTTACAGGCTGCG |
| | | TTATAGCTTGGAATTCTAACAATCTTGATTCTAAGGTTGGTGGTAATTATAATTACCTGTATAGATTGTTTAGGAAGTCT |
| | | AATCTCAAACCTTTTGAGAGAGATATTTCAACTGAAATCTATCAGGCCGGTAGCACACCTTGTAATGGTGTTGAAGGTT |
| | | TTAATTGTTACTTTCCTTTACAATCATATGGTTTCCAACCCACTAATGGTGTTGGTTACCAACCATACAGAGTAGTAGTA |
| | | CTTTCTTTTGAACTTCTACATGCACCAGCAACTGTTTGTGGACCTAAAAAGTCTACTAATTTGGTTAAAAACAAATGTGT |
| | | CAATTTCGGAAGCGGCAGGCTGAGACGAGGCAGCGGCGCCACCAACTTCAGCCTGTTGAAGCAGGCCGGCGACGT |
| | | GGAGGAAAACCCCGGCCCCATGGGAGTCAAAGTTCTGTTTGCCCTGATCTGCATTGCTGTGGCCGAGGCCAAGAGA |
| | | GTCCAACCAACAGAATCTATTGTTAGATTTCCTAATATTACAAACTTGTGCCCTTTTGGTGAAGTTTTTAACGCCACCAG |
| | | ATTTGCATCCGTGTATGCTTGGAACAGGAAGAGAATCAGCAACTGTGTTGCTGATTATTCTGTCCTATATAATTCCGCA |
| | | TCATTTTCCACTTTTAAGTGTTATGGAGTGTCTCCTACTAAATTAAATGATCTCTGCTTTACTAATGTCTATGCAGATTCA |
| | | TTTGTAATTAGAGGTGATGAAGTCAGACAAATCGCTCCAGGGCAAACTGGAAAGATTGCTGATTATAATTATAAATTAC |
| | | CAGATGATTTTACAGGCTGCGTTATAGCTTGGAATTCTAACAATCTTGATTCTAAGGTTGGTGGTAATTATAATTACCTG |
| | | TATAGATTGTTTAGGAAGTCTAATCTCAAACCTTTTGAGAGAGATATTTCAACTGAAATCTATCAGGCCGGTAGCACAC |
| | | CTTGTAATGGTGTTGAAGGTTTTAATTGTTACTTTCCTTTACAATCATATGGTTTCCAACCCACTAATGGTGTTGGTTAC |
| | | CAACCATACAGAGTAGTAGTACTTTCTTTTGAACTTCTACATGCACCAGCAACTGTTTGTGGACCTAAAAAGTCTACTA |
| | | ATTTGGTTAAAAACAAATGTGTCAATTTCGGAAGCGGCAGGCTGAGACGAGGCAGCGGCGCCACCAACTTCAGCCTG |
| | | TTGAAGCAGGCCGGCGACGTGGAGGAAAACCCCGGCCCCATGGGAGTCAAAGTTCTGTTTGCCCTGATCTGCATTG |
| | | CTGTGGCCGAGGCCAAGAGAGTCCAACCAACAGAATCTATTGTTAGATTTCCTAATATTACAAACTTGTGCCCTTTTGG |
| | | TGAAGTTTTTAACGCCACCAGATTTGCATCCGTGTATGCTTGGAACAGGAAGAGAATCAGCAACTGTGTTGCTGATTAT |
| | | TCTGTCCTATATAATTCCGCATCATTTTCCACTTTTAAGTGTTATGGAGTGTCTCCTACTAAATTAAATGATCTCTGCTTT |
| | | ACTAATGTCTATGCAGATTCATTTGTAATTAGAGGTGATGAAGTCAGACAAATCGCTCCAGGGCAAACTGGAAAGATT |
| | | GCTGATTATAATTATAAATTACCAGATGATTTTACAGGCTGCGTTATAGCTTGGAATTCTAACAATCTTGATTCTAAGGT |
| | | TGGTGGTAATTATAATTACCTGTATAGATTGTTTAGGAAGTCTAATCTCAAACCTTTTGAGAGAGATATTTCAACTGAAA |
| | | TCTATCAGGCCGGTAGCACACCTTGTAATGGTGTTGAAGGTTTTAATTGTTACTTTCCTTTACAATCATATGGTTTCCAA |
| | | CCCACTAATGGTGTTGGTTACCAACCATACAGAGTAGTAGTACTTTCTTTTGAACTTCTACATGCACCAGCAACTGTTT |
| | | GTGGACCTAAAAAGTCTACTAATTTGGTTAAAAACAAATGTGTCAATTTC |
| 242 | 2A3461 | ATGGGAGTCAAAGTTCTGTTTGCCCTGATCTGCATTGCTGTGGCCGAGGCCAAGAGAGTCCAACCAACAGAATCTATT |
| | | GTTAGATTTCCTAATATTACAAACTTGTGCCCTTTTGGTGAAGTTTTTAACGCCACCAGATTTGCATCCGTGTATGCTTG |
| | | GAACAGGAAGAGAATCAGCAACTGTGTTGCTGATTATTCTGTCCTATATAATTCCGCATCATTTTCCACTTTTAAGTGTT |
| | | ATGGAGTGTCTCCTACTAAATTAAATGATCTCTGCTTTACTAATGTCTATGCAGATTCATTTGTAATTAGAGGTGATGAA |
| | | GTCAGACAAATCGCTCCAGGGCAAACTGGAAAGATTGCTGATTATAATTATAAATTACCAGATGATTTTACAGGCTGCG |
| | | TTATAGCTTGGAATTCTAACAATCTTGATTCTAAGGTTGGTGGTAATTATAATTACCTGTATAGATTGTTTAGGAAGTCT |
| | | AATCTCAAACCTTTTGAGAGAGATATTTCAACTGAAATCTATCAGGCCGGTAGCACACCTTGTAATGGTGTTGAAGGTT |
| | | TTAATTGTTACTTTCCTTTACAATCATATGGTTTCCAACCCACTAATGGTGTTGGTTACCAACCATACAGAGTAGTAGTA |
| | | CTTTCTTTTGAACTTCTACATGCACCAGCAACTGTTTGTGGACCTAAAAAGTCTACTAATTTGGTTAAAAACAAATGTGT |
| | | CAATTTCGGAAGCGGCAGGCTGAGACGAGGCAGCGGCGCCACCAACTTCAGCCTGTTGAAGCAGGCCGGCGACGT |
| | | GGAGGAAAACCCCGGCCCCAGAGTCCAACCAACAGAATCTATTGTTAGATTTCCTAATATTACAAACTTGTGCCCTTTT |
| | | GGTGAAGTTTTTAACGCCACCAGATTTGCATCCGTGTATGCTTGGAACAGGAAGAGAATCAGCAACTGTGTTGCTGAT |
| | | TATTCTGTCCTATATAATTCCGCATCATTTTCCACTTTTAAGTGTTATGGAGTGTCTCCTACTAAATTAAATGATCTCTGC |
| | | TTTACTAATGTCTATGCAGATTCATTTGTAATTAGAGGTGATGAAGTCAGACAAATCGCTCCAGGGCAAACTGGAAAGA |
| | | TTGCTGATTATAATTATAAATTACCAGATGATTTTACAGGCTGCGTTATAGCTTGGAATTCTAACAATCTTGATTCTAAG |
| | | GTTGGTGGTAATTATAATTACCTGTATAGATTGTTTAGGAAGTCTAATCTCAAACCTTTTGAGAGAGATATTTCAACTGA |
| | | AATCTATCAGGCCGGTAGCACACCTTGTAATGGTGTTGAAGGTTTTAATTGTTACTTTCCTTTACAATCATATGGTTTCC |
| | | AACCCACTAATGGTGTTGGTTACCAACCATACAGAGTAGTAGTACTTTCTTTTGAACTTCTACATGCACCAGCAACTGT |
| | | TTGTGGACCTAAAAAGTCTACTAATTTGGTTAAAAACAAATGTGTCAATTTC |
| 243 | 2A4461 | ATGGGAGTCAAAGTTCTGTTTGCCCTGATCTGCATTGCTGTGGCCGAGGCCAAGAGAGTCCAACCAACAGAATCTATT |
| | | GTTAGATTTCCTAATATTACAAACTTGTGCCCTTTTGGTGAAGTTTTTAACGCCACCAGATTTGCATCCGTGTATGCTTG |
| | | GAACAGGAAGAGAATCAGCAACTGTGTTGCTGATTATTCTGTCCTATATAATTCCGCATCATTTTCCACTTTTAAGTGTT |
| | | ATGGAGTGTCTCCTACTAAATTAAATGATCTCTGCTTTACTAATGTCTATGCAGATTCATTTGTAATTAGAGGTGATGAA |
| | | GTCAGACAAATCGCTCCAGGGCAAACTGGAAAGATTGCTGATTATAATTATAAATTACCAGATGATTTTACAGGCTGCG |
| | | TTATAGCTTGGAATTCTAACAATCTTGATTCTAAGGTTGGTGGTAATTATAATTACCTGTATAGATTGTTTAGGAAGTCT |
| | | AATCTCAAACCTTTTGAGAGAGATATTTCAACTGAAATCTATCAGGCCGGTAGCACACCTTGTAATGGTGTTGAAGGTT |
| | | TTAATTGTTACTTTCCTTTACAATCATATGGTTTCCAACCCACTAATGGTGTTGGTTACCAACCATACAGAGTAGTAGTA |
| | | CTTTCTTTTGAACTTCTACATGCACCAGCAACTGTTTGTGGACCTAAAAAGTCTACTAATTTGGTTAAAAACAAATGTGT |
| | | CAATTTCGGAAGCGGCAGGCTGAGACGAGGCAGCGGCGCCACCAACTTCAGCCTGTTGAAGCAGGCCGGCGACGT |
| | | GGAGGAAAACCCCGGCCCCAGAGTCCAACCAACAGAATCTATTGTTAGATTTCCTAATATTACAAACTTGTGCCCTTTT |
| | | GGTGAAGTTTTTAACGCCACCAGATTTGCATCCGTGTATGCTTGGAACAGGAAGAGAATCAGCAACTGTGTTGCTGAT |
| | | TATTCTGTCCTATATAATTCCGCATCATTTTCCACTTTTAAGTGTTATGGAGTGTCTCCTACTAAATTAAATGATCTCTGC |
| | | TTTACTAATGTCTATGCAGATTCATTTGTAATTAGAGGTGATGAAGTCAGACAAATCGCTCCAGGGCAAACTGGAAAGA |
| | | TTGCTGATTATAATTATAAATTACCAGATGATTTTACAGGCTGCGTTATAGCTTGGAATTCTAACAATCTTGATTCTAAG |
| | | GTTGGTGGTAATTATAATTACCTGTATAGATTGTTTAGGAAGTCTAATCTCAAACCTTTTGAGAGAGATATTTCAACTGA |
| | | AATCTATCAGGCCGGTAGCACACCTTGTAATGGTGTTGAAGGTTTTAATTGTTACTTTCCTTTACAATCATATGGTTTCC |
| | | AACCCACTAATGGTGTTGGTTACCAACCATACAGAGTAGTAGTACTTTCTTTTGAACTTCTACATGCACCAGCAACTGT |
| | | TTGTGGACCTAAAAAGTCTACTAATTTGGTTAAAAACAAATGTGTCAATTTCGGAAGCGGCAGGCTGAGACGAGGCAG |
| | | CGGCGCCACCAACTTCAGCCTGTTGAAGCAGGCCGGCGACGTGGAGGAAAACCCCGGCCCCAGAGTCCAACCAACA |
| | | GAATCTATTGTTAGATTTCCTAATATTACAAACTTGTGCCCTTTTGGTGAAGTTTTTAACGCCACCAGATTTGCATCCGT |
| | | GTATGCTTGGAACAGGAAGAGAATCAGCAACTGTGTTGCTGATTATTCTGTCCTATATAATTCCGCATCATTTTCCACT |
| | | TTTAAGTGTTATGGAGTGTCTCCTACTAAATTAAATGATCTCTGCTTTACTAATGTCTATGCAGATTCATTTGTAATTAGA |
| | | GGTGATGAAGTCAGACAAATCGCTCCAGGGCAAACTGGAAAGATTGCTGATTATAATTATAAATTACCAGATGATTTTA |
| | | CAGGCTGCGTTATAGCTTGGAATTCTAACAATCTTGATTCTAAGGTTGGTGGTAATTATAATTACCTGTATAGATTGTTT |
| | | AGGAAGTCTAATCTCAAACCTTTTGAGAGAGATATTTCAACTGAAATCTATCAGGCCGGTAGCACACCTTGTAATGGTG |
| | | TTGAAGGTTTTAATTGTTACTTTCCTTTACAATCATATGGTTTCCAACCCACTAATGGTGTTGGTTACCAACCATACAGA |
| | | GTAGTAGTACTTTCTTTTGAACTTCTACATGCACCAGCAACTGTTTGTGGACCTAAAAAGTCTACTAATTTGGTTAAAAA |
| | | CAAATGTGTCAATTTC |
| 244 | 2A5461 | ATGGGAGTCAAAGTTCTGTTTGCCCTGATCTGCATTGCTGTGGCCGAGGCCAAGAGAGTCCAACCAACAGAATCTATT |
| | | GTTAGATTTCCTAATATTACAAACTTGTGCCCTTTTGGTGAAGTTTTTAACGCCACCAGATTTGCATCCGTGTATGCTTG |
| | | GAACAGGAAGAGAATCAGCAACTGTGTTGCTGATTATTCTGTCCTATATAATTCCGCATCATTTTCCACTTTTAAGTGTT |
| | | ATGGAGTGTCTCCTACTAAATTAAATGATCTCTGCTTTACTAATGTCTATGCAGATTCATTTGTAATTAGAGGTGATGAA |
| | | GTCAGACAAATCGCTCCAGGGCAAACTGGAAAGATTGCTGATTATAATTATAAATTACCAGATGATTTTACAGGCTGCG |
| | | TTATAGCTTGGAATTCTAACAATCTTGATTCTAAGGTTGGTGGTAATTATAATTACCTGTATAGATTGTTTAGGAAGTCT |
| | | AATCTCAAACCTTTTGAGAGAGATATTTCAACTGAAATCTATCAGGCCGGTAGCACACCTTGTAATGGTGTTGAAGGTT |
| | | TTAATTGTTACTTTCCTTTACAATCATATGGTTTCCAACCCACTAATGGTGTTGGTTACCAACCATACAGAGTAGTAGTA |
| | | CTTTCTTTTGAACTTCTACATGCACCAGCAACTGTTTGTGGACCTAAAAAGTCTACTAATTTGGTTAAAAACAAATGTGT |
| | | CAATTTCGGAAGCGGCAGGCTGAGACGAGGCAGCGGCGCCACCAACTTCAGCCTGTTGAAGCAGGCCGGCGACGT |
| | | GGAGGAAAACCCCGGCCCCGGCCTCGAACAACTCGAAAGCATTATCAATTTTGAAAAACTCACAGAATGGACCAGTG |
| | | GACTCGAGCAACTCGAGAGTATCATTAATTTCGAAAAGCTCACAGAGTGGACAAGCGGCCTGGAGCAGCTGGAGAGC |
| | | ATCATAAACTTCGAGAAGCTGACCGAGTGGACCAGC |
| 245 | 2A6461 | ATGGGAGTCAAAGTTCTGTTTGCCCTGATCTGCATTGCTGTGGCCGAGGCCAAGAGAGTCCAACCAACAGAATCTATT |
| | | GTTAGATTTCCTAATATTACAAACTTGTGCCCTTTTGGTGAAGTTTTTAACGCCACCAGATTTGCATCCGTGTATGCTTG |
| | | GAACAGGAAGAGAATCAGCAACTGTGTTGCTGATTATTCTGTCCTATATAATTCCGCATCATTTTCCACTTTTAAGTGTT |
| | | ATGGAGTGTCTCCTACTAAATTAAATGATCTCTGCTTTACTAATGTCTATGCAGATTCATTTGTAATTAGAGGTGATGAA |
| | | GTCAGACAAATCGCTCCAGGGCAAACTGGAAAGATTGCTGATTATAATTATAAATTACCAGATGATTTTACAGGCTGCG |
| | | TTATAGCTTGGAATTCTAACAATCTTGATTCTAAGGTTGGTGGTAATTATAATTACCTGTATAGATTGTTTAGGAAGTCT |
| | | AATCTCAAACCTTTTGAGAGAGATATTTCAACTGAAATCTATCAGGCCGGTAGCACACCTTGTAATGGTGTTGAAGGTT |
| | | TTAATTGTTACTTTCCTTTACAATCATATGGTTTCCAACCCACTAATGGTGTTGGTTACCAACCATACAGAGTAGTAGTA |
| | | CTTTCTTTTGAACTTCTACATGCACCAGCAACTGTTTGTGGACCTAAAAAGTCTACTAATTTGGTTAAAAACAAATGTGT |
| | | CAATTTCCGGCGGAAGCGGAGAAGCGGCAGCGGCGCCACCAACTTCAGCCTGTTGAAGCAGGCCGGCGACGTGGA |
| | | GGAAAACCCCGGCCCCATGGGAGTCAAAGTTCTGTTTGCCCTGATCTGCATTGCTGTGGCCGAGGCCAAGAGAGTCC |
| | | AACCAACAGAATCTATTGTTAGATTTCCTAATATTACAAACTTGTGCCCTTTTGGTGAAGTTTTTAACGCCACCAGATTT |
| | | GCATCCGTGTATGCTTGGAACAGGAAGAGAATCAGCAACTGTGTTGCTGATTATTCTGTCCTATATAATTCCGCATCAT |
| | | TTTCCACTTTTAAGTGTTATGGAGTGTCTCCTACTAAATTAAATGATCTCTGCTTTACTAATGTCTATGCAGATTCATTTG |
| | | TAATTAGAGGTGATGAAGTCAGACAAATCGCTCCAGGGCAAACTGGAAAGATTGCTGATTATAATTATAAATTACCAGA |
| | | TGATTTTACAGGCTGCGTTATAGCTTGGAATTCTAACAATCTTGATTCTAAGGTTGGTGGTAATTATAATTACCTGTATA |
| | | GATTGTTTAGGAAGTCTAATCTCAAACCTTTTGAGAGAGATATTTCAACTGAAATCTATCAGGCCGGTAGCACACCTTG |
| | | TAATGGTGTTGAAGGTTTTAATTGTTACTTTCCTTTACAATCATATGGTTTCCAACCCACTAATGGTGTTGGTTACCAAC |
| | | CATACAGAGTAGTAGTACTTTCTTTTGAACTTCTACATGCACCAGCAACTGTTTGTGGACCTAAAAAGTCTACTAATTTG |
| | | GTTAAAAACAAATGTGTCAATTTC |
| 246 | 2A6481 | ATAGGTCTCACATGTTTGTTTTCTTAGTTTTATTACCTTTAGTTTCTTCCCAGTGTGTTAATTTAACTACTAGAACTCAAT |
| | | TACCTCCTGCTTATACTAATTCTTTTACTAGAGGAGTGTATTATCCTGATAAGGTTTTTAGATCTTCTGTTCTGCACTCT |
| | | ACTCAGGATTTGTTCTTGCCCTTCTTCTCTAACGTGACCTGGTTCCACGCTATTCACGTTTCTGGAACCAACGGCACTA |
| | | AGAGATTTGATAATCCCGTTTTGCCTTTTAACGACGGAGTTTATTTCGCCTCTACCGAAAAATCTAACATCATTAGGGG |
| | | CTGGATCTTTGGAACTACCCTGGATTCTAAAACTCAATCTTTATTGATTGTGAATAACGCTACCAACGTTGTGATTAAAG |
| | | TTTGTGAATTTCAATTTTGTAACGATCCTTTTCTGGGAGTTTATTATCATAAAAACAATAAATCTTGGATGGAATCTGAAT |
| | | TCCGCGTTTATTCTTCTGCCAATAACTGTACCTTTGAGTACGTTTCTCAACCTTTCTTAATGGATTTAGAAGGAAAACAA |
| | | GGCAATTTCAAAAACTTAAGAGAATTTGTTTTTAAAAATATTGACGGATATTTTAAAATTTATTCTAAGCATACTCCTATT |
| | | AATTTAGTGAGAGACTTACCCCAAGGATTTTCTGCTTTAGAACCTTTAGTTGACTTACCTATTGGAATCAATATCACTAG |
| | | ATTTCAAACTTTATTAGCTTTACATAGATCTTATTTAACTCCTGGAGATTCTTCCTCCGGCTGGACAGCCGGAGCCGCT |
| | | GCTTATTACGTTGGATATTTACAGCCTAGAACTTTTCTGCTGAAATATAACGAAAACGGAACCATTACCGACGCCGTTG |
| | | ACTGTGCTCTGGATCCTTTATCTGAAACCAAGTGTACTTTAAAATCTTTTACCGTTGAAAAAGGAATTTATCAAACTTCT |
| | | AATTTTAGAGTTCAACCTACTGAATCTATCGTTAGATTCCCTAATATTACTAATTTGTGTCCCTTTGGAGAGGTTTTCAA |
| | | CGCTACTAGATTTGCCTCTGTTTACGCTTGGAATCGCAAGAGAATTTCTAATTGTGTGGCCGATTACTCCGTTTTGTAT |
| | | AACTCTGCTTCTTTCTCTACTTTTAAGTGTTACGGAGTTTCCCCTACTAAACTGAACGATTTGTGTTTTACTAACGTTTA |
| | | CGCTGATTCTTTTGTTATTAGAGGCGACGAAGTTAGACAAATTGCTCCTGGACAAACTGGAAAGATTGCTGACTATAAC |
| | | TATAAACTGCCTGACGATTTTACCGGCTGTGTTATTGCTTGGAATTCTAATAATTTAGATTCTAAAGTTGGAGGAAATTA |
| | | TAATTATTTATATAGATTATTTAGAAAATCTAATTTAAAACCTTTTGAAAGAGATATTTCCACTGAGATTTACCAGGCTGG |
| | | ATCTACTCCTTGTAACGGCGTTGAGGGATTTAATTGTTATTTTCCTTTACAATCTTACGGATTTCAACCTACCAACGGAG |
| | | TTGGATATCAACCTTACAGAGTTGTGGTGCTGTCTTTTGAATTATTACACGCTCCCGCTACTGTTTGCGGCCCTAAAAA |
| | | GTCTACTAATCTGGTTAAGAATAAGTGTGTGAATTTTAATTTCAACGGATTGACCGGAACTGGAGTTCTGACTGAATCT |
| | | AATAAAAAATTTTTACCCTTTCAACAATTTGGAAGGGATATCGCTGATACTACTGACGCTGTTAGAGATCCTCAAACTTT |
| | | AGAAATCCTGGATATTACTCCTTGTTCTTTTGGAGGAGTTTCCGTTATTACTCCTGGCACTAATACTTCTAATCAAGTTG |
| | | CTGTTTTATATCAAGACGTTAATTGCACCGAAGTTCCTGTTGCTATTCACGCTGATCAGTTAACTCCTACTTGGAGAGT |
| | | TTATTCTACTGGATCTAACGTTTTTCAAACCAGAGCTGGCTGTTTAATCGGAGCTGAACACGTGAATAATTCTTACGAG |
| | | TGCGATATTCCCATCGGAGCTGGAATTTGTGCCTCTTATCAAACTCAAACCAATTCTCCTAGGAGGGCTAGATCCGTT |
| | | GCCTCTCAATCTATTATTGCTTATACCATGTCTTTAGGAGCTGAAAATTCCGTTGCTTACTCTAACAATTCTATTGCTAT |
| | | TCCTACTAACTTTACTATTTCTGTTACTACTGAAATTCTGCCCGTGTCCATGACTAAAACTTCTGTTGATTGTACTATGT |
| | | ATATTTGTGGAGATTCCACTGAGTGTTCTAACCTGTTATTACAATACGGATCTTTTTGTACTCAATTAAATAGAGCTCTG |
| | | ACTGGAATTGCTGTTGAACAGGACAAAAATACTCAAGAAGTTTTTGCCCAAGTTAAACAGATTTATAAAACTCCTCCTAT |
| | | TAAAGATTTTGGAGGATTTAATTTCTCTCAAATTTTACCTGACCCTTCTAAGCCTTCCAAAAGGTCTTTCATCGAAGATT |
| | | TATTATTTAATAAAGTTACCTTAGCCGACGCTGGATTTATTAAGCAATACGGAGATTGCTTAGGCGATATCGCTGCTAG |
| | | AGACTTAATTTGTGCTCAAAAATTTAACGGATTAACTGTTTTACCTCCCCTGTTAACTGACGAAATGATCGCTCAATATA |
| | | CTTCTGCTCTGTTAGCTGGAACTATTACTTCTGGCTGGACTTTTGGAGCTGGAGCTGCTTTACAAATTCCCTTTGCTAT |
| | | GCAGATGGCTTATAGATTTAACGGAATTGGAGTTACTCAAAACGTTTTATACGAAAATCAAAAATTAATTGCTAATCAAT |
| | | TTAATTCTGCTATTGGAAAAATTCAAGATTCCCTGTCTTCTACTGCTTCCGCTCTGGGAAAATTACAAGACGTTGTTAAT |
| | | CAAAACGCTCAAGCTTTGAATACCTTAGTTAAACAATTATCTTCCAATTTTGGAGCTATTTCTTCTGTTTTAAACGACATT |
| | | TTATCTAGATTAGATCCCCCTGAAGCTGAAGTTCAGATTGACAGATTGATTACCGGAAGATTACAATCTTTACAAACTTA |
| | | CGTTACTCAACAACTGATTAGAGCTGCTGAAATTAGAGCCTCTGCTAATTTAGCTGCTACTAAGATGTCTGAGTGTGTT |
| | | TTAGGACAGTCCAAAAGAGTTGATTTTTGTGGAAAAGGCTATCATCTGATGTCTTTTCCTCAATCTGCTCCTCACGGAG |
| | | TTGTGTTTTTACACGTTACTTACGTTCCTGCTCAAGAGAAGAATTTTACTACTGCTCCTGCTATTTGTCACGACGGAAAA |
| | | GCTCATTTTCCTAGAGAAGGAGTTTTTGTTTCTAACGGAACTCATTGGTTTGTTACTCAAAGAAACTTTTACGAACCTCA |
| | | GATTATTACCACTGATAATACCTTTGTTTCTGGCAATTGTGACGTGGTTATTGGAATTGTTAATAATACTGTTTACGATC |
| | | CTTTACAACCCGAACTGGATTCTTTTAAAGAAGAATTAGATAAATACTTTAAAAATCATACTTCTCCCGACGTTGATTTA |
| | | GGAGATATCTCTGGAATTAACGCTTCTGTTGTGAATATTCAAAAGGAAATTGATAGATTAAACGAAGTGGCTAAAAATT |
| | | TAAACGAGTCTTTAATTGATTTACAGGAACTGGGAAAATACGAACAATATATTAAGTGGCCTTGGTACATTTGGTTAGG |
| | | CTTTATTGCTGGACTGATTGCTATTGTGATGGTTACTATCATGTTGTGTTGCATGACTTCTTGTTGTTCCTGTTTAAAAG |
| | | GCTGTTGCTCTTGTGGATCTTGTTGCAAATTTGACGAAGACGATTCTGAACCTGTTCTGAAAGGAGTTAAACTGCATTA |
| | | TACTTAAATGAGACCATA |
| 247 | 2A7481 | ATAGGTCTCACATGTTCGTGTTCTTAGTGCTGTTACCCCTGGTTTCTTCTCAGTGTGTCAATTTAACCACCAGAACCCA |
| | | ACTGCCTCCTGCCTATACTAATTCCTTTACCCGCGGAGTTTACTATCCCGATAAGGTTTTTCGCTCCTCTGTTTTACAC |
| | | TCTACTCAGGACTTATTCTTACCCTTCTTCTCCAACGTTACTTGGTTTCACGCCATTCACGTTTCTGGAACCAACGGAA |
| | | CTAAGAGATTCGATAATCCTGTGTTACCTTTCAACGACGGAGTTTATTTTGCTTCCACTGAAAAATCCAATATCATTAGG |
| | | GGCTGGATCTTTGGAACCACTTTAGATTCCAAGACTCAATCTTTATTAATTGTGAATAACGCCACCAACGTGGTTATCA |
| | | AAGTGTGTGAATTCCAATTTTGTAACGACCCTTTCTTAGGCGTGTATTATCACAAAAATAATAAATCTTGGATGGAATCT |
| | | GAATTTCGCGTTTACTCTTCCGCTAACAACTGCACTTTTGAGTACGTTTCCCAGCCTTTTCTGATGGATCTGGAAGGCA |
| | | AACAGGGAAATTTTAAAAATCTGAGAGAATTTGTTTTTAAGAACATTGACGGATATTTCAAGATCTATTCTAAACACACT |
| | | CCCATCAATTTGGTTAGAGATTTACCTCAGGGCTTTTCTGCTTTAGAACCTTTAGTTGACCTGCCTATTGGAATCAACA |
| | | TTACTAGATTTCAAACTCTGTTAGCTCTGCATAGATCTTATTTAACTCCTGGAGATTCCTCCTCCGGCTGGACCGCCGG |
| | | AGCTGCTGCTTATTACGTTGGCTATTTACAACCCAGAACTTTTCTGTTAAAATATAACGAAAACGGCACCATCACTGAC |
| | | GCCGTGGATTGTGCTTTAGATCCCTTATCCGAAACTAAGTGTACTCTGAAATCCTTCACTGTTGAAAAAGGAATTTATC |
| | | AGACCTCTAATTTTAGAGTGCAACCTACCGAATCTATTGTTAGATTTCCTAATATTACCAACTTGTGCCCTTTTGGCGAA |
| | | GTTTTCAACGCTACTAGATTTGCTTCTGTTTACGCTTGGAATAGAAAAAGAATTTCTAACTGTGTGGCTGACTATTCCGT |
| | | GTTATACAATTCTGCCTCTTTTTCTACTTTTAAGTGTTACGGAGTGTCTCCCACTAAACTGAACGATTTGTGCTTTACCA |
| | | ACGTTTACGCTGATTCTTTTGTTATTAGAGGCGACGAGGTTCGCCAGATTGCCCCTGGCCAGACTGGCAAAATTGCTG |
| | | ACTATAACTATAAATTACCTGACGATTTTACCGGCTGCGTTATCGCTTGGAACTCTAATAATCTGGATTCTAAAGTTGGA |
| | | GGAAACTACAATTATTTATATAGATTATTTAGAAAATCTAATTTAAAACCCTTCGAGAGGGATATCTCTACTGAAATCTA |
| | | CCAAGCTGGATCTACTCCTTGCAACGGCGTTGAAGGATTTAATTGTTATTTTCCTTTACAATCTTACGGATTCCAACCT |
| | | ACTAACGGAGTTGGATATCAGCCTTATAGAGTGGTGGTTTTATCTTTCGAATTATTACACGCTCCCGCTACTGTGTGTG |
| | | GACCCAAAAAGTCTACTAATTTAGTTAAAAATAAGTGTGTTAATTTCAATTTTAACGGACTCACTGGCACTGGAGTGTTA |
| | | ACTGAATCTAATAAAAAGTTCTTACCTTTCCAACAGTTCGGACGCGACATTGCCGACACCACTGACGCTGTGAGAGAT |
| | | CCTCAAACCTTAGAGATTCTGGATATTACCCCTTGTTCCTTTGGAGGCGTTTCCGTTATCACTCCCGGAACTAACACTT |
| | | CTAATCAGGTTGCCGTTTTATATCAGGACGTTAATTGCACTGAAGTTCCTGTTGCTATTCACGCTGATCAACTGACTCC |
| | | TACTTGGAGAGTTTATTCCACTGGATCTAACGTTTTTCAGACTCGCGCCGGCTGTTTAATTGGAGCTGAACACGTGAA |
| | | CAACTCCTACGAGTGCGATATTCCTATTGGCGCTGGCATCTGTGCTTCTTATCAAACTCAAACTAATTCTCCCAGGAG |
| | | GGCTCGCTCTGTTGCTTCCCAATCTATCATTGCTTATACTATGTCCTTAGGCGCTGAAAATTCTGTTGCTTATTCCAAC |
| | | AATTCTATTGCTATTCCCACCAATTTTACTATTTCTGTGACTACTGAAATTTTACCTGTTTCCATGACTAAGACTTCTGTT |
| | | GATTGTACTATGTATATCTGCGGAGATTCTACTGAGTGTTCCAACCTCTTATTACAGTACGGATCTTTTTGCACTCAGTT |
| | | AAATAGAGCTCTGACTGGAATCGCTGTTGAACAAGACAAAAACACCCAAGAAGTGTTTGCTCAGGTGAAGCAAATTTA |
| | | CAAGACACCTCCTATTAAGGATTTTGGAGGATTCAATTTTTCCCAGATTTTACCTGATCCTTCTAAACCTTCTAAACGCT |
| | | CCTTTATTGAAGATTTACTGTTCAATAAAGTGACTCTGGCTGACGCTGGCTTCATCAAGCAATACGGCGATTGTTTAGG |
| | | AGACATCGCTGCTAGAGACTTAATTTGTGCTCAAAAATTCAACGGACTGACTGTTCTGCCCCCTTTACTGACCGACGA |
| | | GATGATCGCCCAATATACTTCTGCCCTGTTAGCTGGCACCATTACTTCTGGCTGGACCTTTGGAGCTGGCGCTGCTTT |
| | | ACAAATTCCTTTCGCCATGCAGATGGCTTATCGCTTTAACGGAATTGGCGTTACCCAAAACGTGTTATACGAGAATCAA |
| | | AAATTAATCGCCAATCAATTTAATTCTGCTATTGGCAAGATTCAAGATTCTTTATCTTCTACTGCTTCCGCCCTGGGCAA |
| | | ACTGCAGGACGTTGTTAACCAGAACGCTCAAGCCCTGAACACTTTAGTGAAGCAACTGTCTTCTAACTTCGGCGCTAT |
| | | TTCTTCCGTTTTAAACGACATTCTGTCTCGCTTAGATCCCCCTGAGGCTGAGGTTCAAATTGATAGACTGATTACTGGA |
| | | AGATTACAGTCCCTGCAAACTTACGTTACTCAACAGTTAATCAGAGCTGCTGAAATCCGCGCTTCCGCTAATTTAGCTG |
| | | CTACTAAAATGTCTGAGTGTGTGTTAGGCCAGTCTAAGAGAGTTGACTTTTGTGGCAAGGGCTATCATTTAATGTCTTT |
| | | TCCTCAGTCCGCTCCTCACGGCGTTGTGTTCTTACACGTGACTTACGTTCCCGCCCAAGAGAAAAATTTTACCACTGC |
| | | TCCTGCTATTTGTCACGACGGAAAAGCTCATTTTCCTAGAGAAGGAGTGTTTGTTTCTAACGGAACCCACTGGTTTGTG |
| | | ACTCAAAGAAACTTTTACGAACCCCAAATTATTACTACTGACAATACTTTCGTTTCCGGCAACTGTGACGTGGTGATCG |
| | | GAATTGTTAATAACACCGTTTACGATCCCTTACAACCTGAATTAGATTCTTTTAAAGAAGAATTAGATAAATATTTCAAAA |
| | | ATCATACTTCCCCTGACGTTGATCTGGGAGATATTTCTGGAATTAACGCTTCTGTGGTGAACATTCAAAAAGAGATTGA |
| | | CAGATTAAACGAAGTTGCTAAAAACCTGAACGAGTCCCTGATCGACCTGCAGGAACTGGGAAAATACGAGCAGTATAT |
| | | TAAGTGGCCTTGGTATATTTGGTTAGGATTTATTGCTGGATTAATTGCTATTGTGATGGTGACCATTATGTTGTGCTGTA |
| | | TGACCTCTTGTTGTTCTTGCCTGAAGGGCTGCTGTTCTTGTGGCTCTTGTTGCAAGTTTGACGAAGACGATTCCGAAC |
| | | CCGTTTTAAAGGGAGTGAAACTGCATTATACTTAAATGAGACCATA |
| 248 | 2A8481 | ATAGGTCTCACATGTTTGTTTTTCTGGTTTTATTACCCTTAGTGTCCTCCCAGTGCGTGAACTTAACTACCCGCACTCA |
| | | GCTGCCTCCTGCCTATACCAACTCTTTCACTAGAGGCGTTTACTATCCTGACAAAGTTTTTAGATCTTCTGTGCTGCAT |
| | | TCCACTCAAGATTTATTCCTGCCCTTCTTTTCTAACGTTACTTGGTTTCACGCCATCCACGTGTCTGGCACCAACGGAA |
| | | CCAAACGCTTTGACAACCCTGTGTTACCTTTTAACGACGGAGTTTACTTCGCCTCCACTGAAAAGTCCAATATTATCCG |
| | | GGGCTGGATTTTCGGAACCACCTTAGATTCTAAAACCCAGTCTCTGCTGATTGTGAACAACGCCACTAACGTGGTTAT |
| | | TAAAGTGTGCGAGTTTCAATTTTGCAACGACCCTTTTCTGGGAGTTTATTACCACAAAAATAACAAATCTTGGATGGAG |
| | | TCTGAATTTAGAGTGTATTCTTCCGCCAATAATTGCACCTTCGAGTACGTTTCCCAACCCTTTCTGATGGACTTAGAAG |
| | | GAAAGCAAGGCAATTTCAAAAACCTGCGCGAATTTGTGTTCAAAAATATTGACGGCTATTTCAAAATTTACTCCAAGCA |
| | | TACCCCTATTAATTTAGTGCGCGATCTGCCTCAGGGCTTCTCTGCCTTAGAGCCTTTAGTGGACCTGCCTATTGGCAT |
| | | TAATATTACTCGCTTTCAGACTTTACTGGCCCTGCATAGATCTTATTTAACTCCTGGAGACTCTTCTTCCGGCTGGACC |
| | | GCTGGAGCCGCTGCCTACTACGTTGGCTATCTGCAGCCTAGAACTTTTTTATTAAAGTACAACGAAAACGGAACCATC |
| | | ACTGACGCTGTTGATTGCGCCCTGGATCCTTTATCTGAAACAAAGTGCACCCTGAAGTCCTTCACCGTTGAAAAGGGC |
| | | ATTTACCAAACATCCAATTTTAGGGTTCAGCCTACTGAATCCATCGTGCGCTTTCCCAACATCACTAACTTGTGTCCCT |
| | | TTGGCGAGGTGTTTAACGCCACTCGCTTTGCCTCTGTGTACGCCTGGAACAGAAAGAGAATTTCCAATTGCGTGGCTG |
| | | ATTATTCTGTGCTGTATAACTCCGCTTCTTTCTCCACCTTTAAGTGTTACGGAGTGTCCCCTACTAAACTGAACGACTT |
| | | GTGCTTCACCAACGTTTACGCCGATTCTTTTGTGATTCGCGGCGACGAAGTTAGACAAATCGCCCCCGGACAGACCG |
| | | GAAAGATCGCTGATTACAACTATAAGTTACCTGACGACTTCACCGGCTGCGTGATTGCTTGGAATTCTAATAACTTAGA |
| | | CTCTAAAGTTGGAGGCAACTACAATTACCTGTATAGATTATTCCGCAAATCTAACCTGAAACCTTTTGAGAGAGACATC |
| | | TCCACCGAAATTTACCAAGCCGGCTCTACCCCCTGCAACGGAGTTGAAGGATTTAATTGCTACTTTCCCCTGCAGTCC |
| | | TACGGATTCCAACCTACTAACGGCGTTGGATACCAACCTTACAGAGTTGTGGTGCTGTCTTTTGAATTATTACACGCCC |
| | | CTGCCACCGTTTGTGGCCCTAAGAAATCTACCAATCTGGTTAAAAACAAGTGTGTGAATTTTAATTTTAACGGCCTGAC |
| | | CGGCACTGGCGTTTTAACCGAGTCTAACAAGAAGTTTCTGCCTTTCCAACAATTTGGCAGAGACATCGCCGACACCAC |
| | | CGACGCTGTGCGCGATCCTCAAACCTTAGAAATTTTAGATATTACTCCTTGCTCTTTCGGCGGCGTTTCCGTTATTACT |
| | | CCTGGAACCAATACCTCTAATCAAGTGGCTGTGCTGTACCAGGACGTTAATTGCACTGAAGTGCCTGTGGCTATTCAC |
| | | GCCGATCAACTGACCCCCACTTGGAGAGTTTATTCTACTGGATCTAACGTGTTCCAAACTAGAGCTGGCTGTCTGATC |
| | | GGCGCCGAGCACGTTAATAATTCTTACGAGTGTGATATCCCTATTGGCGCTGGCATTTGCGCCTCTTACCAGACCCAG |
| | | ACCAACTCCCCCCGCAGAGCTAGATCCGTGGCCTCTCAGTCCATTATTGCCTATACTATGTCCTTAGGAGCCGAAAAT |
| | | TCTGTGGCTTACTCCAACAATTCTATTGCCATTCCCACTAATTTTACTATCTCTGTGACTACCGAAATCCTGCCCGTGT |
| | | CCATGACTAAGACCTCCGTGGACTGCACCATGTATATCTGCGGAGACTCTACTGAGTGTTCCAACTTATTACTGCAGT |
| | | ACGGCTCTTTCTGTACTCAGCTGAATAGAGCCCTGACTGGAATTGCTGTGGAGCAAGACAAAAATACCCAGGAGGTG |
| | | TTCGCTCAGGTGAAACAAATTTATAAGACCCCTCCCATCAAAGATTTTGGAGGCTTCAATTTTTCTCAAATTCTGCCCG |
| | | ACCCCTCCAAGCCTTCCAAAAGATCCTTTATTGAAGATCTGCTGTTCAATAAGGTTACTTTAGCCGACGCCGGCTTCAT |
| | | TAAGCAGTACGGAGATTGTCTGGGCGATATTGCTGCCCGCGACCTGATTTGCGCTCAGAAGTTCAACGGATTAACCG |
| | | TTCTGCCTCCTCTGCTGACTGACGAGATGATTGCTCAGTATACTTCTGCCCTGCTGGCTGGAACTATTACCTCTGGCT |
| | | GGACCTTCGGCGCCGGAGCTGCTCTGCAAATTCCCTTCGCCATGCAAATGGCTTACAGATTTAACGGCATCGGAGTT |
| | | ACTCAAAACGTGCTGTACGAAAACCAAAAATTAATTGCCAACCAGTTCAATTCCGCTATCGGCAAAATTCAGGATTCTC |
| | | TGTCTTCTACTGCTTCCGCTTTAGGCAAACTGCAAGACGTTGTTAACCAGAACGCCCAAGCTTTAAACACCCTGGTTAA |
| | | GCAGCTGTCCTCTAATTTTGGCGCTATCTCTTCTGTTCTGAACGACATTTTATCTAGACTGGACCCCCCTGAAGCCGA |
| | | GGTGCAGATTGATAGATTAATCACCGGAAGACTGCAATCCCTGCAGACCTACGTTACCCAGCAATTAATCAGAGCCGC |
| | | CGAGATCAGAGCCTCTGCCAACTTAGCTGCCACCAAAATGTCCGAGTGTGTGCTGGGACAGTCCAAGCGCGTGGACT |
| | | TCTGTGGAAAGGGATACCACCTGATGTCTTTTCCTCAATCTGCTCCCCACGGAGTTGTGTTTCTGCACGTTACTTACGT |
| | | GCCTGCCCAAGAGAAAAACTTTACTACCGCCCCCGCTATTTGCCACGACGGCAAGGCTCACTTCCCTAGAGAAGGAG |
| | | TTTTTGTGTCTAACGGAACCCATTGGTTTGTGACTCAAAGAAATTTTTACGAGCCTCAAATCATTACCACCGATAACACT |
| | | TTTGTTTCCGGCAATTGTGACGTGGTGATTGGAATCGTTAACAACACCGTTTACGACCCTTTACAGCCCGAATTAGACT |
| | | CTTTTAAAGAGGAGTTAGATAAATATTTTAAAAACCATACCTCTCCCGACGTGGACCTGGGAGATATTTCCGGAATTAA |
| | | CGCTTCTGTTGTGAATATCCAGAAAGAGATCGACAGATTAAACGAGGTTGCTAAAAATTTAAACGAATCCCTGATTGAC |
| | | CTGCAGGAGCTGGGCAAATACGAACAATATATTAAGTGGCCTTGGTATATTTGGTTAGGCTTCATCGCTGGATTAATC |
| | | GCTATTGTTATGGTGACTATTATGTTGTGTTGTATGACTTCCTGCTGTTCTTGCTTAAAAGGCTGCTGTTCCTGCGGAT |
| | | CCTGTTGTAAATTCGACGAGGACGATTCCGAGCCTGTTTTAAAAGGAGTGAAATTACATTATACTTAAATGAGACCATA |
| 249 | 2A9481 | ATAGGTCTCACATGTTCGTGTTCCTGGTGCTGCTGCCCTTAGTGTCCTCCCAGTGTGTGAACCTGACCACCAGAACCC |
| | | AGTTACCTCCCGCTTACACCAACTCCTTTACCCGCGGAGTGTACTACCCTGATAAGGTTTTTAGATCCTCCGTTCTGCA |
| | | TTCTACCCAAGACCTGTTTTTACCCTTCTTTTCCAACGTGACCTGGTTCCACGCTATCCACGTGTCCGGCACTAACGG |
| | | CACTAAGCGCTTCGACAATCCTGTGCTCCCTTTTAACGACGGCGTGTACTTCGCTTCTACCGAAAAATCCAACATCAT |
| | | CCGCGGCTGGATCTTCGGAACTACCCTGGATTCTAAAACCCAGTCTTTATTAATCGTGAATAACGCCACCAACGTGGT |
| | | TATTAAGGTCTGTGAGTTCCAATTTTGCAACGACCCTTTCTTAGGCGTTTATTACCACAAAAACAATAAGTCTTGGATG |
| | | GAGTCCGAATTCCGCGTGTACTCCTCTGCCAACAATTGCACCTTTGAGTACGTGTCCCAGCCCTTCCTGATGGACCTG |
| | | GAAGGCAAGCAGGGCAATTTTAAAAATCTGCGCGAATTCGTTTTCAAGAACATCGACGGCTACTTTAAGATTTATTCCA |
| | | AACATACCCCCATCAACCTGGTGCGCGATTTACCCCAGGGCTTCTCCGCCTTAGAGCCCTTAGTGGATCTGCCTATC |
| | | GGCATCAATATCACCCGCTTTCAGACTCTGCTGGCCCTGCACAGATCCTACCTGACTCCCGGAGACTCTTCTTCTGGC |
| | | TGGACCGCCGGAGCTGCCGCCTACTACGTGGGCTACCTGCAACCCCGCACCTTTCTGCTGAAGTACAACGAAAACG |
| | | GCACCATCACAGACGCCGTTGACTGCGCTCTGGACCCCCTGTCTGAGACTAAGTGCACCCTGAAGTCCTTCACTGTG |
| | | GAGAAAGGAATCTACCAGACCTCCAACTTCCGCGTGCAGCCTACCGAATCCATTGTTCGCTTCCCTAACATTACTAAT |
| | | CTGTGCCCCTTCGGAGAAGTTTTCAACGCCACTAGATTCGCTTCCGTGTACGCCTGGAATCGCAAGCGCATCTCCAAT |
| | | TGCGTTGCTGACTACTCTGTGTTATACAATTCCGCCTCTTTTTCCACTTTCAAGTGCTACGGCGTGTCTCCTACCAAGC |
| | | TGAACGACCTGTGTTTCACTAACGTGTACGCTGATTCCTTTGTTATCCGCGGCGACGAGGTGAGACAGATCGCCCCT |
| | | GGCCAGACCGGAAAAATCGCCGACTACAACTACAAGTTACCCGACGATTTTACCGGCTGTGTTATTGCTTGGAACTCT |
| | | AATAATCTGGACTCTAAAGTGGGGGGCAATTACAACTACTTATATCGCCTGTTCAGAAAATCCAACCTGAAACCCTTCG |
| | | AACGGGACATTTCCACCGAAATTTATCAGGCCGGCTCCACCCCCTGCAACGGAGTGGAGGGCTTCAATTGCTACTTC |
| | | CCCCTGCAATCCTACGGCTTTCAGCCCACCAACGGCGTGGGATACCAGCCCTACCGCGTTGTTGTGTTATCCTTTGA |
| | | ACTGCTGCACGCTCCTGCTACTGTGTGCGGACCTAAAAAATCCACCAATCTGGTGAAGAACAAGTGTGTGAATTTTAA |
| | | TTTTAACGGCCTGACCGGCACCGGAGTGCTGACCGAGTCCAACAAAAAGTTTCTGCCCTTTCAGCAGTTCGGCCGGG |
| | | ACATTGCCGACACTACCGACGCTGTGAGGGATCCTCAGACCCTGGAGATTCTGGACATTACCCCTTGCTCCTTCGGA |
| | | GGAGTTTCCGTGATCACCCCTGGCACCAATACTTCTAACCAAGTGGCTGTTTTATACCAGGACGTGAATTGTACTGAG |
| | | GTGCCTGTGGCCATCCACGCCGATCAATTAACTCCCACCTGGAGAGTGTATTCCACCGGCTCTAACGTTTTCCAAACC |
| | | CGCGCTGGCTGCTTAATCGGCGCTGAGCACGTGAACAACTCCTACGAGTGTGATATTCCTATCGGAGCCGGCATCTG |
| | | TGCTTCCTACCAGACTCAGACCAACTCCCCCAGACGCGCTAGGTCCGTGGCTTCCCAGTCTATTATCGCTTATACTAT |
| | | GTCCCTGGGAGCCGAGAATTCTGTTGCCTATTCCAATAACTCCATCGCCATTCCTACCAACTTTACCATCTCTGTGACC |
| | | ACCGAGATTCTGCCCGTGTCCATGACCAAAACTTCTGTGGATTGTACCATGTACATCTGTGGAGATTCCACCGAGTGC |
| | | TCTAACCTGCTGCTGCAGTACGGCTCCTTTTGCACCCAATTAAACCGCGCTCTGACTGGCATCGCCGTGGAGCAAGA |
| | | TAAAAACACCCAAGAGGTGTTCGCTCAGGTGAAGCAGATCTACAAGACACCTCCCATTAAAGATTTCGGAGGCTTTAA |
| | | TTTCTCTCAGATCCTGCCCGACCCTTCTAAGCCCTCTAAACGCTCCTTCATCGAGGATCTGCTGTTCAACAAGGTTAC |
| | | CCTGGCCGACGCTGGCTTTATCAAACAGTACGGCGACTGCTTAGGCGACATCGCCGCCCGCGATTTAATTTGCGCTC |
| | | AGAAGTTCAACGGACTGACCGTGCTGCCTCCTCTGCTGACCGACGAAATGATCGCCCAATACACCTCCGCCCTGCTG |
| | | GCTGGCACTATCACCTCCGGCTGGACCTTTGGCGCTGGAGCCGCTCTGCAAATCCCTTTCGCTATGCAGATGGCTTA |
| | | CCGCTTTAACGGAATCGGCGTGACCCAGAACGTGTTATACGAAAATCAGAAATTAATTGCCAATCAATTTAACTCTGCC |
| | | ATCGGCAAGATTCAGGATTCTCTGTCTTCTACTGCCTCTGCCTTAGGAAAACTGCAGGACGTGGTGAATCAGAACGCC |
| | | CAGGCCCTGAATACCCTGGTTAAGCAACTGTCTTCCAATTTCGGCGCTATCTCCTCTGTGTTAAACGACATTCTGTCC |
| | | CGCCTGGATCCTCCTGAGGCCGAAGTGCAAATTGACCGCTTAATCACTGGCAGACTGCAATCCCTGCAAACCTACGT |
| | | TACTCAACAGCTGATCAGAGCCGCCGAAATCCGCGCTTCTGCCAACTTAGCTGCTACCAAGATGTCCGAGTGCGTGC |
| | | TGGGACAGTCCAAAAGAGTTGACTTTTGCGGAAAGGGCTACCACCTGATGTCCTTTCCCCAGTCCGCCCCCCACGGA |
| | | GTTGTTTTCCTGCACGTTACTTACGTTCCTGCTCAAGAGAAGAACTTCACCACCGCTCCCGCTATTTGCCACGACGGC |
| | | AAGGCTCATTTCCCCAGAGAGGGAGTGTTTGTGTCCAACGGCACTCACTGGTTTGTTACTCAGCGCAACTTCTACGAA |
| | | CCTCAGATCATCACCACTGACAATACCTTTGTGTCCGGAAACTGTGACGTGGTTATCGGCATTGTGAACAATACTGTG |
| | | TACGACCCTTTACAACCTGAGCTGGATTCTTTTAAAGAAGAACTGGACAAGTACTTCAAGAACCACACCTCCCCCGAC |
| | | GTGGATCTGGGCGACATCTCCGGCATCAACGCCTCTGTGGTGAATATTCAGAAGGAGATTGATCGCCTGAACGAGGT |
| | | TGCCAAGAATCTGAACGAGTCTCTGATCGACCTGCAGGAGCTGGGCAAGTACGAACAGTACATCAAGTGGCCCTGGT |
| | | ACATTTGGCTGGGCTTTATTGCTGGACTGATCGCTATCGTTATGGTTACCATCATGCTGTGCTGTATGACCTCTTGCTG |
| | | CTCCTGTCTGAAAGGCTGTTGCTCCTGCGGCTCCTGTTGTAAGTTTGACGAGGACGACTCCGAGCCTGTTCTGAAAG |
| | | GAGTTAAACTGCACTACACCTAAATGAGACCATA |
| 250 | 2A0581 | ATAGGTCTCACATGTTTGTGTTTCTGGTGCTGCTGCCTCTGGTGTCCTCTCAGTGTGTTAACCTGACCACCAGAACCC |
| | | AACTGCCCCCCGCCTACACTAACTCTTTCACTCGCGGCGTGTACTACCCCGATAAAGTTTTCAGATCCTCCGTGCTCC |
| | | ATTCTACCCAAGACCTGTTCTTACCCTTTTTCTCCAACGTGACCTGGTTCCACGCCATCCACGTGTCCGGCACTAACG |
| | | GAACCAAGCGCTTCGATAATCCCGTGCTGCCTTTCAACGACGGAGTTTACTTTGCTTCCACCGAGAAGTCCAATATTA |
| | | TCCGGGGCTGGATCTTCGGCACCACACTGGATTCCAAAACCCAGTCCTTACTGATTGTGAACAACGCCACTAACGTG |
| | | GTGATCAAGGTGTGTGAGTTCCAGTTCTGTAACGACCCCTTTCTGGGCGTGTATTATCATAAAAACAACAAGTCCTGG |
| | | ATGGAGTCCGAGTTTAGAGTGTATTCTTCCGCTAACAACTGCACCTTCGAATACGTGTCCCAGCCTTTCCTGATGGAT |
| | | CTGGAAGGAAAGCAGGGCAACTTCAAGAACTTACGCGAGTTCGTGTTCAAGAACATCGACGGCTACTTCAAAATTTAC |
| | | TCCAAGCACACCCCTATCAACTTAGTGAGAGATCTGCCCCAGGGCTTCTCCGCTCTGGAACCTCTGGTGGACTTACC |
| | | CATTGGCATCAACATCACTCGCTTCCAAACACTGCTCGCTCTGCACCGCTCTTATCTGACCCCCGGCGACTCCTCTTC |
| | | TGGCTGGACCGCCGGCGCCGCTGCCTATTACGTGGGATACCTGCAACCCCGCACCTTTCTGCTGAAATACAACGAAA |
| | | ACGGCACCATCACAGACGCTGTGGACTGCGCTCTGGACCCCCTGTCCGAGACTAAGTGCACCCTGAAGTCCTTCACC |
| | | GTTGAAAAGGGCATTTATCAGACTTCCAACTTCCGCGTGCAGCCTACTGAGTCCATTGTGCGCTTCCCTAACATCACT |
| | | AACTTGTGTCCTTTCGGCGAAGTGTTCAACGCTACTCGCTTCGCCTCCGTGTACGCCTGGAACCGCAAGAGAATCTC |
| | | CAATTGCGTGGCCGACTACTCTGTTCTCTACAACTCTGCCTCCTTCTCCACCTTTAAGTGCTACGGCGTGTCCCCCAC |
| | | CAAACTGAACGACCTGTGCTTCACCAACGTGTACGCCGACTCCTTTGTGATCAGAGGCGACGAGGTGCGCCAGATCG |
| | | CCCCCGGCCAGACTGGCAAGATCGCCGATTACAATTACAAGCTGCCTGACGACTTTACCGGCTGCGTGATTGCCTGG |
| | | AACTCCAACAACCTGGACTCCAAAGTGGGGGGCAACTACAACTACCTGTACCGCCTGTTTAGAAAATCCAACCTGAAG |
| | | CCCTTCGAGCGGGACATTTCTACTGAGATCTACCAGGCCGGCTCCACCCCCTGTAACGGCGTGGAAGGCTTCAACTG |
| | | CTACTTTCCCCTGCAGTCCTACGGCTTCCAGCCTACCAACGGCGTGGGCTACCAGCCCTACCGCGTGGTGGTGTTAT |
| | | CCTTCGAGCTGCTGCACGCCCCTGCCACCGTGTGCGGACCCAAAAAGTCTACTAACCTGGTTAAGAATAAGTGTGTT |
| | | AATTTCAATTTTAACGGCTTAACCGGAACCGGAGTGCTGACCGAGTCCAATAAAAAGTTCCTGCCCTTTCAGCAGTTT |
| | | GGCCGCGACATCGCCGATACTACCGACGCCGTGCGCGATCCCCAGACCCTGGAGATCCTGGACATTACCCCCTGCT |
| | | CTTTCGGCGGAGTGTCCGTGATCACCCCCGGCACCAATACCTCCAATCAGGTGGCCGTTCTGTACCAGGACGTGAAT |
| | | TGCACCGAAGTGCCCGTGGCCATTCACGCCGACCAGTTAACTCCTACTTGGAGAGTGTACTCCACCGGCTCTAACGT |
| | | GTTTCAGACCCGCGCCGGCTGTCTGATCGGCGCCGAGCACGTGAACAACTCCTACGAGTGCGACATTCCCATTGGC |
| | | GCCGGCATCTGCGCCTCCTACCAAACCCAGACTAACTCTCCCAGACGCGCCCGCTCTGTGGCCTCTCAGTCCATCAT |
| | | CGCTTACACTATGTCCCTGGGCGCCGAGAACTCCGTGGCCTATTCCAACAACTCCATCGCCATCCCCACTAACTTCAC |
| | | CATCTCTGTGACCACCGAAATCCTCCCCGTGTCTATGACTAAGACTTCCGTGGACTGTACCATGTACATTTGCGGCGA |
| | | CTCCACCGAGTGTTCCAATCTGCTGCTGCAGTACGGCTCCTTTTGCACCCAGCTGAACCGCGCCCTGACCGGCATCG |
| | | CTGTTGAGCAGGACAAGAATACCCAGGAGGTGTTTGCTCAGGTGAAGCAAATCTATAAGACCCCTCCCATCAAGGAC |
| | | TTTGGCGGCTTCAACTTTTCCCAGATCCTGCCCGACCCTTCCAAGCCCTCCAAACGCTCTTTCATCGAAGATCTGCTG |
| | | TTCAATAAAGTGACCCTGGCCGACGCCGGCTTCATCAAGCAGTACGGAGACTGTCTGGGAGACATTGCTGCTCGCGA |
| | | CCTGATTTGCGCCCAGAAGTTCAACGGCCTGACCGTGCTGCCCCCTCTGCTGACCGACGAGATGATCGCTCAGTACA |
| | | CCTCCGCCCTGCTGGCTGGCACTATCACCTCCGGCTGGACTTTCGGCGCTGGCGCCGCCCTGCAGATTCCCTTCGC |
| | | CATGCAGATGGCTTATCGCTTCAACGGAATCGGAGTGACACAGAACGTGCTGTACGAGAATCAGAAACTGATCGCTA |
| | | ACCAGTTTAATTCCGCCATTGGCAAGATCCAGGACTCCCTGTCCTCTACTGCTTCCGCCCTGGGCAAGCTGCAGGAC |
| | | GTGGTGAACCAGAACGCCCAGGCTCTGAACACCCTGGTGAAGCAACTGTCTTCTAACTTTGGAGCCATTTCTTCCGTG |
| | | CTGAACGACATCCTGTCCAGACTGGATCCTCCTGAGGCCGAGGTGCAGATCGACCGCCTGATCACTGGCCGCCTGC |
| | | AGTCCCTGCAGACTTACGTTACCCAGCAATTAATCCGCGCTGCCGAGATCCGCGCCTCCGCCAACCTGGCCGCCACC |
| | | AAGATGTCCGAGTGCGTTCTGGGCCAGTCCAAACGCGTTGACTTCTGCGGCAAGGGCTACCACCTGATGTCCTTCCC |
| | | CCAGTCCGCTCCCCACGGAGTGGTGTTCCTGCACGTGACCTACGTGCCTGCCCAGGAGAAGAACTTCACCACCGCC |
| | | CCCGCCATTTGCCACGACGGAAAGGCCCACTTCCCCCGCGAGGGAGTGTTCGTTTCTAACGGCACTCACTGGTTCGT |
| | | GACCCAGAGAAACTTCTACGAGCCCCAGATTATTACCACCGACAATACCTTCGTTTCTGGCAACTGCGACGTGGTTAT |
| | | CGGCATCGTGAACAACACCGTGTACGACCCCCTGCAACCCGAGCTGGATTCTTTCAAGGAGGAGCTGGATAAGTACT |
| | | TTAAAAACCATACCTCCCCCGACGTGGACCTGGGCGACATCTCTGGCATCAACGCCTCCGTGGTGAATATCCAGAAG |
| | | GAGATCGATCGCCTGAACGAGGTGGCCAAGAACTTAAACGAATCTCTGATCGACCTGCAGGAGCTGGGCAAGTACGA |
| | | GCAGTATATTAAGTGGCCCTGGTATATCTGGTTAGGCTTTATCGCCGGCCTGATCGCCATTGTTATGGTGACCATCAT |
| | | GCTGTGCTGCATGACCTCCTGCTGTTCCTGTTTAAAAGGCTGCTGCTCCTGCGGATCCTGCTGTAAATTCGACGAAGA |
| | | CGACTCCGAGCCCGTGCTGAAAGGAGTTAAGTTACACTATACCTAAATGAGACCATA |
| 251 | 2A1581 | ATAGGTCTCACATGTTCGTGTTCCTGGTGCTGCTGCCCCTGGTGTCCTCCCAGTGCGTCAACCTGACCACCCGGACC |
| | | CAACTGCCCCCTGCCTATACCAATTCCTTCACCCGGGGCGTCTACTACCCCGACAAGGTGTTCCGGTCCTCTGTGCT |
| | | CCACTCCACCCAGGACCTCTTCCTCCCCTTTTTCTCCAACGTGACCTGGTTCCACGCCATCCACGTGTCTGGCACAAA |
| | | CGGAACCAAGCGCTTCGACAACCCTGTGCTCCCCTTCAACGACGGCGTGTACTTCGCCTCCACCGAGAAGTCCAACA |
| | | TCATCCGCGGCTGGATCTTCGGCACCACCCTCGACTCTAAGACCCAGTCCCTGCTGATTGTGAATAACGCCACCAAC |
| | | GTGGTGATCAAGGTGTGCGAATTTCAGTTCTGCAACGACCCCTTCCTGGGCGTTTACTACCATAAGAACAACAAGTCC |
| | | TGGATGGAGTCCGAGTTCCGGGTGTATTCCTCTGCCAATAACTGCACCTTTGAGTACGTGTCCCAGCCCTTCCTGATG |
| | | GACCTGGAGGGCAAGCAGGGCAATTTTAAAAACCTGCGCGAGTTCGTGTTCAAGAACATCGACGGCTACTTCAAGAT |
| | | CTATTCCAAGCACACCCCTATCAACCTGGTGCGCGACCTGCCCCAGGGCTTTTCCGCTCTGGAGCCCCTGGTTGACC |
| | | TGCCCATCGGCATCAACATCACCCGCTTCCAGACTTTACTGGCCCTGCACCGCTCCTACCTGACCCCCGGCGATTCC |
| | | TCTTCTGGCTGGACAGCCGGAGCCGCTGCCTACTACGTGGGATACCTGCAGCCCCGCACCTTCCTGCTGAAGTACAA |
| | | CGAGAACGGAACCATTACAGACGCTGTCGACTGTGCTCTGGATCCCCTGTCCGAAACAAAGTGCACCCTGAAGTCCT |
| | | TCACCGTGGAGAAGGGCATCTACCAGACCTCCAACTTCCGCGTGCAGCCCACCGAGTCCATCGTGAGATTCCCCAAC |
| | | ATCACTAACCTGTGCCCCTTCGGCGAGGTGTTCAACGCCACCCGCTTCGCCTCCGTGTACGCCTGGAACCGCAAGC |
| | | GCATCTCCAACTGCGTTGCCGACTACTCTGTGCTCTACAACTCCGCCTCCTTCTCCACCTTCAAGTGCTACGGCGTGT |
| | | CCCCCACCAAGCTGAACGACCTGTGCTTCACCAACGTGTACGCCGACTCCTTCGTGATCCGCGGCGACGAGGTGCG |
| | | CCAGATCGCCCCCGGCCAGACCGGAAAGATCGCCGATTACAATTACAAGCTGCCCGACGACTTCACCGGCTGCGTG |
| | | ATCGCCTGGAACTCCAACAATCTGGACTCCAAGGTTGGCGGCAACTACAACTACCTGTACCGCCTGTTCCGCAAGTC |
| | | CAACCTGAAGCCCTTCGAGCGGGACATTTCCACAGAGATTTACCAGGCTGGCTCCACCCCCTGTAACGGAGTGGAGG |
| | | GCTTCAACTGCTACTTCCCCCTGCAGTCCTACGGCTTCCAGCCCACCAACGGCGTGGGCTACCAGCCCTACCGCGTG |
| | | GTGGTGCTGTCCTTCGAGCTGCTGCACGCCCCTGCCACCGTGTGCGGCCCCAAGAAGTCCACCAACCTGGTGAAGA |
| | | ACAAGTGCGTGAACTTCAACTTCAACGGACTGACAGGCACCGGCGTGCTGACCGAGTCCAACAAGAAGTTCCTGCCC |
| | | TTCCAGCAGTTCGGCCGGGACATTGCCGACACCACCGACGCCGTGCGCGACCCCCAGACCCTGGAGATCCTGGACA |
| | | TCACCCCCTGCTCCTTCGGCGGAGTGTCCGTGATCACCCCCGGCACCAACACCTCCAACCAGGTTGCCGTGCTGTAC |
| | | CAGGACGTTAACTGCACCGAGGTGCCCGTGGCCATCCACGCCGACCAGCTGACCCCCACCTGGCGCGTGTACTCCA |
| | | CCGGCTCCAACGTGTTCCAGACCCGCGCCGGCTGCCTGATCGGCGCCGAGCACGTGAACAACTCCTACGAGTGCGA |
| | | CATCCCCATTGGCGCCGGCATCTGCGCCTCCTACCAGACCCAGACCAACTCCCCTCGCCGCGCCCGGTCCGTCGCC |
| | | TCCCAGTCCATCATCGCCTACACCATGTCCCTGGGCGCCGAGAACTCCGTGGCCTACTCCAACAACTCCATTGCCAT |
| | | CCCCACCAACTTCACCATCTCCGTGACCACCGAAATCCTCCCCGTGTCCATGACCAAGACCTCCGTGGACTGCACCA |
| | | TGTACATCTGCGGCGACTCCACCGAGTGCTCCAACCTGCTGCTGCAGTACGGCTCCTTCTGCACCCAGCTGAATCGC |
| | | GCCCTGACCGGCATCGCCGTGGAGCAGGACAAGAACACCCAAGAGGTGTTCGCCCAGGTGAAGCAGATCTACAAGA |
| | | CACCTCCCATCAAGGACTTCGGCGGCTTCAACTTCTCCCAGATCCTGCCCGACCCCTCCAAGCCCTCCAAGCGCTCC |
| | | TTCATCGAGGACCTGCTGTTCAACAAGGTGACCCTGGCCGACGCCGGCTTCATCAAGCAGTACGGCGACTGTCTGG |
| | | GAGACATTGCCGCCCGCGACCTGATCTGCGCCCAGAAGTTCAACGGCTTAACCGTGCTGCCCCCTCTGCTGACCGA |
| | | CGAGATGATCGCCCAGTACACATCCGCTCTGCTGGCCGGCACCATCACCTCCGGCTGGACCTTTGGCGCTGGCGCT |
| | | GCCCTGCAGATCCCCTTCGCTATGCAGATGGCCTACCGCTTCAACGGCATCGGCGTGACCCAGAACGTGCTGTACGA |
| | | GAACCAGAAGCTGATCGCCAACCAGTTCAACTCCGCCATCGGCAAGATCCAGGACTCCCTGTCCTCCACCGCCTCCG |
| | | CCCTGGGCAAGCTGCAGGACGTGGTGAACCAGAACGCCCAGGCCCTGAACACCCTGGTGAAGCAGCTGTCCTCTAA |
| | | CTTCGGCGCCATCTCCTCCGTGCTGAACGACATTCTGTCCCGCCTGGATCCTCCTGAGGCCGAGGTGCAAATCGATC |
| | | GCCTCATCACCGGCCGCCTGCAGTCCCTGCAGACCTACGTGACACAGCAGCTGATCCGCGCCGCCGAGATCCGCGC |
| | | CTCCGCCAACCTGGCCGCCACCAAGATGTCTGAGTGCGTGCTGGGCCAGTCCAAACGCGTTGACTTCTGCGGCAAG |
| | | GGCTACCACCTGATGTCCTTCCCCCAGTCCGCCCCCCACGGCGTGGTGTTCCTGCACGTGACCTACGTGCCCGCCC |
| | | AGGAGAAGAACTTCACTACCGCCCCCGCCATCTGCCACGACGGCAAGGCCCACTTCCCCCGCGAGGGCGTGTTCGT |
| | | GTCCAACGGCACCCACTGGTTCGTGACCCAGCGCAACTTCTACGAGCCCCAGATCATCACCACCGACAACACCTTCG |
| | | TGTCCGGCAACTGCGACGTGGTGATTGGCATCGTGAACAACACCGTGTACGACCCCCTGCAGCCCGAGCTGGACTC |
| | | CTTCAAGGAGGAGCTGGACAAGTACTTTAAGAACCACACCTCCCCCGACGTGGACCTGGGCGACATCTCCGGCATCA |
| | | ACGCCTCCGTGGTGAACATCCAGAAGGAGATCGACCGCCTGAACGAGGTGGCCAAGAACCTGAACGAGTCCCTGAT |
| | | CGACCTGCAGGAGCTGGGCAAGTACGAACAGTACATCAAGTGGCCCTGGTACATCTGGCTGGGCTTCATCGCCGGC |
| | | CTGATCGCCATCGTGATGGTGACCATCATGCTGTGCTGCATGACCTCTTGCTGTTCCTGTCTGAAGGGCTGCTGCTC |
| | | CTGCGGCTCCTGCTGCAAGTTCGACGAGGACGACTCCGAGCCCGTGCTGAAGGGCGTGAAGCTGCACTACACCTAA |
| | | ATGAGACCATA |
| 252 | 2A2581 | ATAGGTCTCACATGTTCGTGTTCCTGGTGCTGCTCCCCCTGGTGAGCTCCCAGTGCGTCAACCTGACCACACGGACC |
| | | CAGCTGCCCCCCGCCTATACCAACAGCTTCACCCGCGGCGTCTACTACCCCGACAAGGTGTTCCGGAGCAGCGTGC |
| | | TGCACAGCACCCAGGACCTCTTCCTCCCCTTTTTTAGCAACGTGACCTGGTTCCACGCCATCCACGTGAGTGGCACC |
| | | AACGGCACCAAGCGGTTCGACAACCCTGTGCTCCCCTTCAACGACGGCGTGTACTTCGCTAGCACAGAAAAAAGTAA |
| | | CATCATTCGGGGCTGGATCTTCGGCACCACACTGGATAGCAAAACCCAGAGCCTGCTGATTGTGAATAACGCCACCA |
| | | ACGTGGTGATCAAGGTGTGCGAGTTCCAGTTCTGCAACGACCCCTTCCTGGGCGTGTACTACCACAAGAACAACAAG |
| | | AGCTGGATGGAGAGCGAGTTCCGCGTGTATAGCTCTGCCAACAACTGCACCTTCGAGTACGTGAGCCAGCCCTTCCT |
| | | GATGGACCTGGAGGGCAAGCAGGGCAATTTCAAAAACCTGCGGGAGTTCGTGTTCAAGAACATCGACGGCTACTTCA |
| | | AGATCTACAGCAAGCACACCCCCATCAACCTGGTGCGGGACCTGCCCCAGGGCTTTAGCGCTCTGGAGCCCCTGGT |
| | | GGACCTGCCCATCGGCATCAACATCACCCGCTTCCAAACCCTGTTGGCCCTGCACCGGAGCTACCTGACCCCTGGC |
| | | GATAGCAGTAGTGGCTGGACAGCCGGAGCCGCCGCCTACTACGTGGGATACCTGCAGCCCCGGACCTTCCTGCTGA |
| | | AGTACAACGAGAACGGCACAATCACAGACGCCGTGGACTGCGCCCTGGACCCCCTGAGCGAAACAAAGTGCACCCT |
| | | CAAAAGTTTCACCGTGGAGAAGGGCATCTACCAGACCAGCAACTTCCGGGTGCAGCCCACCGAGAGCATCGTGCGG |
| | | TTCCCCAACATCACCAACCTGTGCCCCTTCGGCGAGGTGTTCAACGCCACCCGGTTCGCCAGCGTGTACGCCTGGAA |
| | | CCGGAAGCGGATCAGCAACTGCGTGGCCGACTACAGCGTGCTGTATAACAGTGCCAGCTTCAGCACCTTCAAGTGCT |
| | | ACGGCGTGAGCCCCACCAAGCTGAACGACCTGTGCTTCACCAACGTGTACGCCGACAGCTTCGTGATCCGGGGCGA |
| | | CGAGGTGCGGCAGATCGCCCCCGGCCAGACCGGCAAGATCGCCGATTACAATTACAAGCTGCCCGACGATTTCACC |
| | | GGCTGCGTGATCGCCTGGAACAGCAACAACCTGGACAGCAAGGTGGGGGGCAACTACAACTACCTGTACCGGCTGT |
| | | TCCGCAAAAGTAACCTGAAGCCCTTCGAGCGGGACATCAGCACCGAGATCTACCAGGCCGGCAGTACCCCTTGCAAC |
| | | GGCGTCGAGGGCTTCAACTGCTACTTCCCCCTGCAGAGCTACGGCTTCCAGCCCACCAACGGCGTGGGCTACCAGC |
| | | CCTACCGGGTGGTGGTTCTGAGCTTCGAGCTGCTGCACGCCCCTGCCACCGTGTGCGGCCCCAAGAAAAGCACCAA |
| | | CCTGGTGAAGAACAAGTGCGTGAATTTCAATTTTAACGGACTCACCGGAACCGGCGTGCTGACCGAGAGCAACAAGA |
| | | AGTTCCTGCCCTTCCAGCAATTCGGCCGGGATATTGCCGACACCACTGACGCCGTGCGGGACCCCCAGACCCTGGA |
| | | GATCCTGGACATCACACCCTGTAGCTTCGGCGGGGTGAGCGTGATCACCCCCGGCACCAACACCAGCAACCAGGTG |
| | | GCCGTGCTGTACCAGGACGTGAACTGCACCGAGGTGCCCGTGGCCATCCACGCCGACCAGCTGACCCCCACCTGG |
| | | CGGGTGTACAGCACCGGCAGCAACGTGTTCCAGACCCGGGCCGGCTGCCTGATCGGCGCCGAGCACGTGAATAAC |
| | | AGCTACGAGTGCGACATCCCCATCGGAGCCGGAATCTGCGCCAGCTACCAGACCCAGACCAACAGCCCCCGGAGAG |
| | | CCCGGAGCGTGGCCAGCCAGAGCATTATTGCCTACACCATGAGCCTGGGCGCCGAGAACAGCGTGGCCTACAGCAA |
| | | CAATAGTATTGCCATCCCCACCAACTTCACCATCAGCGTGACCACCGAAATCCTCCCCGTGAGCATGACCAAGACCA |
| | | GCGTGGACTGCACCATGTACATCTGCGGCGACAGCACCGAGTGCAGCAACCTGCTCCTGCAGTACGGCAGCTTCTG |
| | | CACCCAGCTGAACCGGGCCCTGACCGGAATTGCCGTGGAGCAGGACAAGAACACCCAGGAGGTGTTCGCCCAGGT |
| | | GAAGCAGATCTACAAGACACCTCCCATCAAGGACTTCGGCGGCTTCAACTTCAGCCAGATCCTGCCCGACCCCAGCA |
| | | AGCCCAGCAAGCGGAGCTTCATCGAGGACCTGTTGTTCAACAAGGTGACCCTGGCCGACGCCGGCTTCATCAAGCA |
| | | GTACGGCGACTGTCTGGGAGATATTGCCGCACGGGACCTGATCTGCGCCCAGAAGTTCAACGGCCTGACCGTGCTG |
| | | CCCCCACTGCTGACCGACGAGATGATCGCCCAGTACACAAGCGCTCTGCTCGCCGGCACCATCACCAGCGGCTGGA |
| | | CCTTCGGCGCCGGCGCTGCCCTGCAGATCCCCTTCGCCATGCAGATGGCCTACCGGTTCAACGGCATCGGCGTGAC |
| | | CCAGAACGTGCTGTACGAGAACCAGAAGCTGATCGCCAACCAGTTCAACAGCGCCATCGGCAAGATCCAGGACAGC |
| | | CTGAGCTCCACCGCCAGCGCCCTGGGCAAGCTGCAGGACGTGGTGAACCAGAACGCCCAGGCCCTGAACACCCTG |
| | | GTGAAGCAGCTGAGCAGCAACTTCGGCGCCATCAGCTCTGTGCTGAACGACATCCTGAGCCGGCTGGATCCTCCTG |
| | | AGGCCGAGGTGCAAATCGATCGGCTCATCACCGGCCGGCTGCAGAGCCTGCAGACCTACGTGACACAGCAGCTGAT |
| | | CCGGGCCGCCGAGATCCGGGCCAGCGCCAACCTGGCCGCTACCAAGATGAGCGAGTGCGTGCTGGGCCAGAGCAA |
| | | GCGGGTGGACTTCTGCGGCAAGGGCTACCACCTGATGAGCTTCCCCCAGAGCGCCCCCCACGGCGTGGTGTTCCTG |
| | | CACGTGACCTACGTGCCCGCCCAGGAGAAGAACTTCACCACCGCCCCCGCCATCTGCCACGACGGCAAGGCCCACT |
| | | TCCCCCGGGAGGGCGTGTTCGTGAGCAACGGCACCCACTGGTTCGTGACCCAGCGGAACTTCTACGAGCCCCAGAT |
| | | CATAACCACAGACAACACCTTCGTGAGCGGCAACTGCGACGTGGTCATCGGCATCGTGAACAACACCGTGTACGACC |
| | | CCCTGCAGCCCGAGCTGGACAGCTTCAAGGAGGAACTGGACAAGTACTTCAAGAACCACACCAGCCCCGACGTGGA |
| | | CCTGGGCGACATCAGCGGCATCAACGCCAGCGTGGTGAACATCCAGAAGGAGATCGACCGGCTGAACGAGGTGGC |
| | | CAAGAACCTGAACGAGAGCCTGATCGACCTGCAGGAGCTGGGCAAGTACGAGCAGTACATCAAGTGGCCCTGGTAC |
| | | ATCTGGCTGGGCTTTATTGCCGGCCTGATCGCCATCGTGATGGTGACCATCATGCTGTGCTGTATGACAAGCTGTTG |
| | | CAGTTGCCTGAAGGGCTGCTGCAGCTGCGGCAGCTGCTGCAAGTTCGACGAGGACGACAGCGAGCCCGTGCTGAA |
| | | GGGCGTGAAGCTGCACTACACCTAAATGAGACCATA |
| 253 | 2A3581 | ATAGGTCTCACACATTAAAACAGCCTGTGGGTTGATCCCACCCACAGGCCCATTGGGCGCTAGCACTCTGGTATCAC |
| | | GGTACCTTTGTGCGCCTGTTTTATACCCCCTCCCCCAACTGTAACTTAGAAGTAACACACACCGATCAACAGTCAGCG |
| | | TGGCACACCAGCCACGTTTTGATCAAGCACTTCTGTTACCCCGGACTGAGTATCAATAGACTGCTCACGCGGTTGAAG |
| | | GAGAAAGCGTTCGTTATCCGGCCAACTACTTCGAAAAACCTAGTAACACCGTGGAAGTTGCAGAGTGTTTCGCTCAGC |
| | | ACTACCCCAGTGTAGATCAGGTCGATGAGTCACCGCATTCCCCACGGGCGACCGTGGCGGTGGCTGCGTTGGCGGC |
| | | CTGCCCATGGGGAAACCCATGGGACGCTCTAATACAGACATGGTGCGAAGAGTCTATTGAGCTAGTTGGTAGTCCTC |
| | | CGGCCCCTGAATGCGGCTAATCCTAACTGCGGAGCACACACCCTCAAGCCAGAGGGCAGTGTGTCGTAACGGGCAA |
| | | CTCTGCAGCGGAACCGACTACTTTGGGTGTCCGTGTTTCATTTTATTCCTATACTGGCTGCTTATGGTGACAATTGAGA |
| | | GATCGTTACCATATAGCTATTGGATTGGCCATCCGGTGACTAATAGAGCTATTATATATCCCTTTGTTGGGTTTATACC |
| | | ACTTAGCTTGAAAGAGGTTAAAACATTACAATTCATTGTTAAGTTGAATACAGCAACATGTTTGTTTTCTTAGTTTTATTA |
| | | CCTTTAGTTTCTTCCCAGTGTGTTAATTTAACTACTAGAACTCAATTACCTCCTGCTTATACTAATTCTTTTACTAGAGGA |
| | | GTGTATTATCCTGATAAGGTTTTTAGATCTTCTGTTCTGCACTCTACTCAGGATTTGTTCTTGCCCTTCTTCTCTAACGT |
| | | GACCTGGTTCCACGCTATTCACGTTTCTGGAACCAACGGCACTAAGAGATTTGATAATCCCGTTTTGCCTTTTAACGAC |
| | | GGAGTTTATTTCGCCTCTACCGAAAAATCTAACATCATTAGGGGCTGGATCTTTGGAACTACCCTGGATTCTAAAACTC |
| | | AATCTTTATTGATTGTGAATAACGCTACCAACGTTGTGATTAAAGTTTGTGAATTTCAATTTTGTAACGATCCTTTTCTG |
| | | GGAGTTTATTATCATAAAAACAATAAATCTTGGATGGAATCTGAATTCCGCGTTTATTCTTCTGCCAATAACTGTACCTT |
| | | TGAGTACGTTTCTCAACCTTTCTTAATGGATTTAGAAGGAAAACAAGGCAATTTCAAAAACTTAAGAGAATTTGTTTTTA |
| | | AAAATATTGACGGATATTTTAAAATTTATTCTAAGCATACTCCTATTAATTTAGTGAGAGACTTACCCCAAGGATTTTCTG |
| | | CTTTAGAACCTTTAGTTGACTTACCTATTGGAATCAATATCACTAGATTTCAAACTTTATTAGCTTTACATAGATCTTATT |
| | | TAACTCCTGGAGATTCTTCCTCCGGCTGGACAGCCGGAGCCGCTGCTTATTACGTTGGATATTTACAGCCTAGAACTT |
| | | TTCTGCTGAAATATAACGAAAACGGAACCATTACCGACGCCGTTGACTGTGCTCTGGATCCTTTATCTGAAACCAAGT |
| | | GTACTTTAAAATCTTTTACCGTTGAAAAAGGAATTTATCAAACTTCTAATTTTAGAGTTCAACCTACTGAATCTATCGTTA |
| | | GATTCCCTAATATTACTAATTTGTGTCCCTTTGGAGAGGTTTTCAACGCTACTAGATTTGCCTCTGTTTACGCTTGGAAT |
| | | CGCAAGAGAATTTCTAATTGTGTGGCCGATTACTCCGTTTTGTATAACTCTGCTTCTTTCTCTACTTTTAAGTGTTACGG |
| | | AGTTTCCCCTACTAAACTGAACGATTTGTGTTTTACTAACGTTTACGCTGATTCTTTTGTTATTAGAGGCGACGAAGTTA |
| | | GACAAATTGCTCCTGGACAAACTGGAAAGATTGCTGACTATAACTATAAACTGCCTGACGATTTTACCGGCTGTGTTAT |
| | | TGCTTGGAATTCTAATAATTTAGATTCTAAAGTTGGAGGAAATTATAATTATTTATATAGATTATTTAGAAAATCTAATTTA |
| | | AAACCTTTTGAAAGAGATATTTCCACTGAGATTTACCAGGCTGGATCTACTCCTTGTAACGGCGTTGAGGGATTTAATT |
| | | GTTATTTTCCTTTACAATCTTACGGATTTCAACCTACCAACGGAGTTGGATATCAACCTTACAGAGTTGTGGTGCTGTC |
| | | TTTTGAATTATTACACGCTCCCGCTACTGTTTGCGGCCCTAAAAAGTCTACTAATCTGGTTAAGAATAAGTGTGTGAAT |
| | | TTTAATTTCAACGGATTGACCGGAACTGGAGTTCTGACTGAATCTAATAAAAAATTTTTACCCTTTCAACAATTTGGAAG |
| | | GGATATCGCTGATACTACTGACGCTGTTAGAGATCCTCAAACTTTAGAAATCCTGGATATTACTCCTTGTTCTTTTGGA |
| | | GGAGTTTCCGTTATTACTCCTGGCACTAATACTTCTAATCAAGTTGCTGTTTTATATCAAGACGTTAATTGCACCGAAGT |
| | | TCCTGTTGCTATTCACGCTGATCAGTTAACTCCTACTTGGAGAGTTTATTCTACTGGATCTAACGTTTTTCAAACCAGA |
| | | GCTGGCTGTTTAATCGGAGCTGAACACGTGAATAATTCTTACGAGTGCGATATTCCCATCGGAGCTGGAATTTGTGCC |
| | | TCTTATCAAACTCAAACCAATTCTCCTAGGAGGGCTAGATCCGTTGCCTCTCAATCTATTATTGCTTATACCATGTCTTT |
| | | AGGAGCTGAAAATTCCGTTGCTTACTCTAACAATTCTATTGCTATTCCTACTAACTTTACTATTTCTGTTACTACTGAAAT |
| | | TCTGCCCGTGTCCATGACTAAAACTTCTGTTGATTGTACTATGTATATTTGTGGAGATTCCACTGAGTGTTCTAACCTG |
| | | TTATTACAATACGGATCTTTTTGTACTCAATTAAATAGAGCTCTGACTGGAATTGCTGTTGAACAGGACAAAAATACTCA |
| | | AGAAGTTTTTGCCCAAGTTAAACAGATTTATAAAACTCCTCCTATTAAAGATTTTGGAGGATTTAATTTCTCTCAAATTTT |
| | | ACCTGACCCTTCTAAGCCTTCCAAAAGGTCTTTCATCGAAGATTTATTATTTAATAAAGTTACCTTAGCCGACGCTGGA |
| | | TTTATTAAGCAATACGGAGATTGCTTAGGCGATATCGCTGCTAGAGACTTAATTTGTGCTCAAAAATTTAACGGATTAA |
| | | CTGTTTTACCTCCCCTGTTAACTGACGAAATGATCGCTCAATATACTTCTGCTCTGTTAGCTGGAACTATTACTTCTGG |
| | | CTGGACTTTTGGAGCTGGAGCTGCTTTACAAATTCCCTTTGCTATGCAGATGGCTTATAGATTTAACGGAATTGGAGTT |
| | | ACTCAAAACGTTTTATACGAAAATCAAAAATTAATTGCTAATCAATTTAATTCTGCTATTGGAAAAATTCAAGATTCCCTG |
| | | TCTTCTACTGCTTCCGCTCTGGGAAAATTACAAGACGTTGTTAATCAAAACGCTCAAGCTTTGAATACCTTAGTTAAAC |
| | | AATTATCTTCCAATTTTGGAGCTATTTCTTCTGTTTTAAACGACATTTTATCTAGATTAGATCCCCCTGAAGCTGAAGTT |
| | | CAGATTGACAGATTGATTACCGGAAGATTACAATCTTTACAAACTTACGTTACTCAACAACTGATTAGAGCTGCTGAAA |
| | | TTAGAGCCTCTGCTAATTTAGCTGCTACTAAGATGTCTGAGTGTGTTTTAGGACAGTCCAAAAGAGTTGATTTTTGTGG |
| | | AAAAGGCTATCATCTGATGTCTTTTCCTCAATCTGCTCCTCACGGAGTTGTGTTTTTACACGTTACTTACGTTCCTGCTC |
| | | AAGAGAAGAATTTTACTACTGCTCCTGCTATTTGTCACGACGGAAAAGCTCATTTTCCTAGAGAAGGAGTTTTTGTTTC |
| | | TAACGGAACTCATTGGTTTGTTACTCAAAGAAACTTTTACGAACCTCAGATTATTACCACTGATAATACCTTTGTTTCTG |
| | | GCAATTGTGACGTGGTTATTGGAATTGTTAATAATACTGTTTACGATCCTTTACAACCCGAACTGGATTCTTTTAAAGAA |
| | | GAATTAGATAAATACTTTAAAAATCATACTTCTCCCGACGTTGATTTAGGAGATATCTCTGGAATTAACGCTTCTGTTGT |
| | | GAATATTCAAAAGGAAATTGATAGATTAAACGAAGTGGCTAAAAATTTAAACGAGTCTTTAATTGATTTACAGGAACTGG |
| | | GAAAATACGAACAATATATTAAGTGGCCTTGGTACATTTGGTTAGGCTTTATTGCTGGACTGATTGCTATTGTGATGGT |
| | | TACTATCATGTTGTGTTGCATGACTTCTTGTTGTTCCTGTTTAAAAGGCTGTTGCTCTTGTGGATCTTGTTGCAAATTTG |
| | | ACGAAGACGATTCTGAACCTGTTCTGAAAGGAGTTAAACTGCATTATACTTAAATGAGACCATA |
| 254 | 2A4581 | ATAGGTCTCACACATTAAAACAGCCTGTGGGTTGATCCCACCCACAGGCCCATTGGGCGCTAGCACTCTGGTATCAC |
| | | GGTACCTTTGTGCGCCTGTTTTATACCCCCTCCCCCAACTGTAACTTAGAAGTAACACACACCGATCAACAGTCAGCG |
| | | TGGCACACCAGCCACGTTTTGATCAAGCACTTCTGTTACCCCGGACTGAGTATCAATAGACTGCTCACGCGGTTGAAG |
| | | GAGAAAGCGTTCGTTATCCGGCCAACTACTTCGAAAAACCTAGTAACACCGTGGAAGTTGCAGAGTGTTTCGCTCAGC |
| | | ACTACCCCAGTGTAGATCAGGTCGATGAGTCACCGCATTCCCCACGGGCGACCGTGGCGGTGGCTGCGTTGGCGGC |
| | | CTGCCCATGGGGAAACCCATGGGACGCTCTAATACAGACATGGTGCGAAGAGTCTATTGAGCTAGTTGGTAGTCCTC |
| | | CGGCCCCTGAATGCGGCTAATCCTAACTGCGGAGCACACACCCTCAAGCCAGAGGGCAGTGTGTCGTAACGGGCAA |
| | | CTCTGCAGCGGAACCGACTACTTTGGGTGTCCGTGTTTCATTTTATTCCTATACTGGCTGCTTATGGTGACAATTGAGA |
| | | GATCGTTACCATATAGCTATTGGATTGGCCATCCGGTGACTAATAGAGCTATTATATATCCCTTTGTTGGGTTTATACC |
| | | ACTTAGCTTGAAAGAGGTTAAAACATTACAATTCATTGTTAAGTTGAATACAGCAACATGTTCGTGTTCTTAGTGCTGTT |
| | | ACCCCTGGTTTCTTCTCAGTGTGTCAATTTAACCACCAGAACCCAACTGCCTCCTGCCTATACTAATTCCTTTACCCGC |
| | | GGAGTTTACTATCCCGATAAGGTTTTTCGCTCCTCTGTTTTACACTCTACTCAGGACTTATTCTTACCCTTCTTCTCCAA |
| | | CGTTACTTGGTTTCACGCCATTCACGTTTCTGGAACCAACGGAACTAAGAGATTCGATAATCCTGTGTTACCTTTCAAC |
| | | GACGGAGTTTATTTTGCTTCCACTGAAAAATCCAATATCATTAGGGGCTGGATCTTTGGAACCACTTTAGATTCCAAGA |
| | | CTCAATCTTTATTAATTGTGAATAACGCCACCAACGTGGTTATCAAAGTGTGTGAATTCCAATTTTGTAACGACCCTTTC |
| | | TTAGGCGTGTATTATCACAAAAATAATAAATCTTGGATGGAATCTGAATTTCGCGTTTACTCTTCCGCTAACAACTGCAC |
| | | TTTTGAGTACGTTTCCCAGCCTTTTCTGATGGATCTGGAAGGCAAACAGGGAAATTTTAAAAATCTGAGAGAATTTGTT |
| | | TTTAAGAACATTGACGGATATTTCAAGATCTATTCTAAACACACTCCCATCAATTTGGTTAGAGATTTACCTCAGGGCTT |
| | | TTCTGCTTTAGAACCTTTAGTTGACCTGCCTATTGGAATCAACATTACTAGATTTCAAACTCTGTTAGCTCTGCATAGAT |
| | | CTTATTTAACTCCTGGAGATTCCTCCTCCGGCTGGACCGCCGGAGCTGCTGCTTATTACGTTGGCTATTTACAACCCA |
| | | GAACTTTTCTGTTAAAATATAACGAAAACGGCACCATCACTGACGCCGTGGATTGTGCTTTAGATCCCTTATCCGAAAC |
| | | TAAGTGTACTCTGAAATCCTTCACTGTTGAAAAAGGAATTTATCAGACCTCTAATTTTAGAGTGCAACCTACCGAATCTA |
| | | TTGTTAGATTTCCTAATATTACCAACTTGTGCCCTTTTGGCGAAGTTTTCAACGCTACTAGATTTGCTTCTGTTTACGCT |
| | | TGGAATAGAAAAAGAATTTCTAACTGTGTGGCTGACTATTCCGTGTTATACAATTCTGCCTCTTTTTCTACTTTTAAGTG |
| | | TTACGGAGTGTCTCCCACTAAACTGAACGATTTGTGCTTTACCAACGTTTACGCTGATTCTTTTGTTATTAGAGGCGAC |
| | | GAGGTTCGCCAGATTGCCCCTGGCCAGACTGGCAAAATTGCTGACTATAACTATAAATTACCTGACGATTTTACCGGC |
| | | TGCGTTATCGCTTGGAACTCTAATAATCTGGATTCTAAAGTTGGAGGAAACTACAATTATTTATATAGATTATTTAGAAA |
| | | ATCTAATTTAAAACCCTTCGAGAGGGATATCTCTACTGAAATCTACCAAGCTGGATCTACTCCTTGCAACGGCGTTGAA |
| | | GGATTTAATTGTTATTTTCCTTTACAATCTTACGGATTCCAACCTACTAACGGAGTTGGATATCAGCCTTATAGAGTGGT |
| | | GGTTTTATCTTTCGAATTATTACACGCTCCCGCTACTGTGTGTGGACCCAAAAAGTCTACTAATTTAGTTAAAAATAAGT |
| | | GTGTTAATTTCAATTTTAACGGACTCACTGGCACTGGAGTGTTAACTGAATCTAATAAAAAGTTCTTACCTTTCCAACAG |
| | | TTCGGACGCGACATTGCCGACACCACTGACGCTGTGAGAGATCCTCAAACCTTAGAGATTCTGGATATTACCCCTTGT |
| | | TCCTTTGGAGGCGTTTCCGTTATCACTCCCGGAACTAACACTTCTAATCAGGTTGCCGTTTTATATCAGGACGTTAATT |
| | | GCACTGAAGTTCCTGTTGCTATTCACGCTGATCAACTGACTCCTACTTGGAGAGTTTATTCCACTGGATCTAACGTTTT |
| | | TCAGACTCGCGCCGGCTGTTTAATTGGAGCTGAACACGTGAACAACTCCTACGAGTGCGATATTCCTATTGGCGCTG |
| | | GCATCTGTGCTTCTTATCAAACTCAAACTAATTCTCCCAGGAGGGCTCGCTCTGTTGCTTCCCAATCTATCATTGCTTA |
| | | TACTATGTCCTTAGGCGCTGAAAATTCTGTTGCTTATTCCAACAATTCTATTGCTATTCCCACCAATTTTACTATTTCTGT |
| | | GACTACTGAAATTTTACCTGTTTCCATGACTAAGACTTCTGTTGATTGTACTATGTATATCTGCGGAGATTCTACTGAGT |
| | | GTTCCAACCTCTTATTACAGTACGGATCTTTTTGCACTCAGTTAAATAGAGCTCTGACTGGAATCGCTGTTGAACAAGA |
| | | CAAAAACACCCAAGAAGTGTTTGCTCAGGTGAAGCAAATTTACAAGACACCTCCTATTAAGGATTTTGGAGGATTCAAT |
| | | TTTTCCCAGATTTTACCTGATCCTTCTAAACCTTCTAAACGCTCCTTTATTGAAGATTTACTGTTCAATAAAGTGACTCT |
| | | GGCTGACGCTGGCTTCATCAAGCAATACGGCGATTGTTTAGGAGACATCGCTGCTAGAGACTTAATTTGTGCTCAAAA |
| | | ATTCAACGGACTGACTGTTCTGCCCCCTTTACTGACCGACGAGATGATCGCCCAATATACTTCTGCCCTGTTAGCTGG |
| | | CACCATTACTTCTGGCTGGACCTTTGGAGCTGGCGCTGCTTTACAAATTCCTTTCGCCATGCAGATGGCTTATCGCTT |
| | | TAACGGAATTGGCGTTACCCAAAACGTGTTATACGAGAATCAAAAATTAATCGCCAATCAATTTAATTCTGCTATTGGC |
| | | AAGATTCAAGATTCTTTATCTTCTACTGCTTCCGCCCTGGGCAAACTGCAGGACGTTGTTAACCAGAACGCTCAAGCC |
| | | CTGAACACTTTAGTGAAGCAACTGTCTTCTAACTTCGGCGCTATTTCTTCCGTTTTAAACGACATTCTGTCTCGCTTAG |
| | | ATCCCCCTGAGGCTGAGGTTCAAATTGATAGACTGATTACTGGAAGATTACAGTCCCTGCAAACTTACGTTACTCAACA |
| | | GTTAATCAGAGCTGCTGAAATCCGCGCTTCCGCTAATTTAGCTGCTACTAAAATGTCTGAGTGTGTGTTAGGCCAGTC |
| | | TAAGAGAGTTGACTTTTGTGGCAAGGGCTATCATTTAATGTCTTTTCCTCAGTCCGCTCCTCACGGCGTTGTGTTCTTA |
| | | CACGTGACTTACGTTCCCGCCCAAGAGAAAAATTTTACCACTGCTCCTGCTATTTGTCACGACGGAAAAGCTCATTTTC |
| | | CTAGAGAAGGAGTGTTTGTTTCTAACGGAACCCACTGGTTTGTGACTCAAAGAAACTTTTACGAACCCCAAATTATTAC |
| | | TACTGACAATACTTTCGTTTCCGGCAACTGTGACGTGGTGATCGGAATTGTTAATAACACCGTTTACGATCCCTTACAA |
| | | CCTGAATTAGATTCTTTTAAAGAAGAATTAGATAAATATTTCAAAAATCATACTTCCCCTGACGTTGATCTGGGAGATAT |
| | | TTCTGGAATTAACGCTTCTGTGGTGAACATTCAAAAAGAGATTGACAGATTAAACGAAGTTGCTAAAAACCTGAACGAG |
| | | TCCCTGATCGACCTGCAGGAACTGGGAAAATACGAGCAGTATATTAAGTGGCCTTGGTATATTTGGTTAGGATTTATT |
| | | GCTGGATTAATTGCTATTGTGATGGTGACCATTATGTTGTGCTGTATGACCTCTTGTTGTTCTTGCCTGAAGGGCTGCT |
| | | GTTCTTGTGGCTCTTGTTGCAAGTTTGACGAAGACGATTCCGAACCCGTTTTAAAGGGAGTGAAACTGCATTATACTTA |
| | | AATGAGACCATA |
| 255 | 2A5581 | ATAGGTCTCACACATTAAAACAGCCTGTGGGTTGATCCCACCCACAGGCCCATTGGGCGCTAGCACTCTGGTATCAC |
| | | GGTACCTTTGTGCGCCTGTTTTATACCCCCTCCCCCAACTGTAACTTAGAAGTAACACACACCGATCAACAGTCAGCG |
| | | TGGCACACCAGCCACGTTTTGATCAAGCACTTCTGTTACCCCGGACTGAGTATCAATAGACTGCTCACGCGGTTGAAG |
| | | GAGAAAGCGTTCGTTATCCGGCCAACTACTTCGAAAAACCTAGTAACACCGTGGAAGTTGCAGAGTGTTTCGCTCAGC |
| | | ACTACCCCAGTGTAGATCAGGTCGATGAGTCACCGCATTCCCCACGGGCGACCGTGGCGGTGGCTGCGTTGGCGGC |
| | | CTGCCCATGGGGAAACCCATGGGACGCTCTAATACAGACATGGTGCGAAGAGTCTATTGAGCTAGTTGGTAGTCCTC |
| | | CGGCCCCTGAATGCGGCTAATCCTAACTGCGGAGCACACACCCTCAAGCCAGAGGGCAGTGTGTCGTAACGGGCAA |
| | | CTCTGCAGCGGAACCGACTACTTTGGGTGTCCGTGTTTCATTTTATTCCTATACTGGCTGCTTATGGTGACAATTGAGA |
| | | GATCGTTACCATATAGCTATTGGATTGGCCATCCGGTGACTAATAGAGCTATTATATATCCCTTTGTTGGGTTTATACC |
| | | ACTTAGCTTGAAAGAGGTTAAAACATTACAATTCATTGTTAAGTTGAATACAGCAACATGTTTGTTTTTCTGGTTTTATTA |
| | | CCCTTAGTGTCCTCCCAGTGCGTGAACTTAACTACCCGCACTCAGCTGCCTCCTGCCTATACCAACTCTTTCACTAGA |
| | | GGCGTTTACTATCCTGACAAAGTTTTTAGATCTTCTGTGCTGCATTCCACTCAAGATTTATTCCTGCCCTTCTTTTCTAA |
| | | CGTTACTTGGTTTCACGCCATCCACGTGTCTGGCACCAACGGAACCAAACGCTTTGACAACCCTGTGTTACCTTTTAA |
| | | CGACGGAGTTTACTTCGCCTCCACTGAAAAGTCCAATATTATCCGGGGCTGGATTTTCGGAACCACCTTAGATTCTAA |
| | | AACCCAGTCTCTGCTGATTGTGAACAACGCCACTAACGTGGTTATTAAAGTGTGCGAGTTTCAATTTTGCAACGACCCT |
| | | TTTCTGGGAGTTTATTACCACAAAAATAACAAATCTTGGATGGAGTCTGAATTTAGAGTGTATTCTTCCGCCAATAATTG |
| | | CACCTTCGAGTACGTTTCCCAACCCTTTCTGATGGACTTAGAAGGAAAGCAAGGCAATTTCAAAAACCTGCGCGAATT |
| | | TGTGTTCAAAAATATTGACGGCTATTTCAAAATTTACTCCAAGCATACCCCTATTAATTTAGTGCGCGATCTGCCTCAG |
| | | GGCTTCTCTGCCTTAGAGCCTTTAGTGGACCTGCCTATTGGCATTAATATTACTCGCTTTCAGACTTTACTGGCCCTGC |
| | | ATAGATCTTATTTAACTCCTGGAGACTCTTCTTCCGGCTGGACCGCTGGAGCCGCTGCCTACTACGTTGGCTATCTGC |
| | | AGCCTAGAACTTTTTTATTAAAGTACAACGAAAACGGAACCATCACTGACGCTGTTGATTGCGCCCTGGATCCTTTATC |
| | | TGAAACAAAGTGCACCCTGAAGTCCTTCACCGTTGAAAAGGGCATTTACCAAACATCCAATTTTAGGGTTCAGCCTACT |
| | | GAATCCATCGTGCGCTTTCCCAACATCACTAACTTGTGTCCCTTTGGCGAGGTGTTTAACGCCACTCGCTTTGCCTCT |
| | | GTGTACGCCTGGAACAGAAAGAGAATTTCCAATTGCGTGGCTGATTATTCTGTGCTGTATAACTCCGCTTCTTTCTCCA |
| | | CCTTTAAGTGTTACGGAGTGTCCCCTACTAAACTGAACGACTTGTGCTTCACCAACGTTTACGCCGATTCTTTTGTGAT |
| | | TCGCGGCGACGAAGTTAGACAAATCGCCCCCGGACAGACCGGAAAGATCGCTGATTACAACTATAAGTTACCTGACG |
| | | ACTTCACCGGCTGCGTGATTGCTTGGAATTCTAATAACTTAGACTCTAAAGTTGGAGGCAACTACAATTACCTGTATAG |
| | | ATTATTCCGCAAATCTAACCTGAAACCTTTTGAGAGAGACATCTCCACCGAAATTTACCAAGCCGGCTCTACCCCCTG |
| | | CAACGGAGTTGAAGGATTTAATTGCTACTTTCCCCTGCAGTCCTACGGATTCCAACCTACTAACGGCGTTGGATACCA |
| | | ACCTTACAGAGTTGTGGTGCTGTCTTTTGAATTATTACACGCCCCTGCCACCGTTTGTGGCCCTAAGAAATCTACCAAT |
| | | CTGGTTAAAAACAAGTGTGTGAATTTTAATTTTAACGGCCTGACCGGCACTGGCGTTTTAACCGAGTCTAACAAGAAGT |
| | | TTCTGCCTTTCCAACAATTTGGCAGAGACATCGCCGACACCACCGACGCTGTGCGCGATCCTCAAACCTTAGAAATTT |
| | | TAGATATTACTCCTTGCTCTTTCGGCGGCGTTTCCGTTATTACTCCTGGAACCAATACCTCTAATCAAGTGGCTGTGCT |
| | | GTACCAGGACGTTAATTGCACTGAAGTGCCTGTGGCTATTCACGCCGATCAACTGACCCCCACTTGGAGAGTTTATTC |
| | | TACTGGATCTAACGTGTTCCAAACTAGAGCTGGCTGTCTGATCGGCGCCGAGCACGTTAATAATTCTTACGAGTGTGA |
| | | TATCCCTATTGGCGCTGGCATTTGCGCCTCTTACCAGACCCAGACCAACTCCCCCCGCAGAGCTAGATCCGTGGCCT |
| | | CTCAGTCCATTATTGCCTATACTATGTCCTTAGGAGCCGAAAATTCTGTGGCTTACTCCAACAATTCTATTGCCATTCC |
| | | CACTAATTTTACTATCTCTGTGACTACCGAAATCCTGCCCGTGTCCATGACTAAGACCTCCGTGGACTGCACCATGTAT |
| | | ATCTGCGGAGACTCTACTGAGTGTTCCAACTTATTACTGCAGTACGGCTCTTTCTGTACTCAGCTGAATAGAGCCCTG |
| | | ACTGGAATTGCTGTGGAGCAAGACAAAAATACCCAGGAGGTGTTCGCTCAGGTGAAACAAATTTATAAGACCCCTCCC |
| | | ATCAAAGATTTTGGAGGCTTCAATTTTTCTCAAATTCTGCCCGACCCCTCCAAGCCTTCCAAAAGATCCTTTATTGAAG |
| | | ATCTGCTGTTCAATAAGGTTACTTTAGCCGACGCCGGCTTCATTAAGCAGTACGGAGATTGTCTGGGCGATATTGCTG |
| | | CCCGCGACCTGATTTGCGCTCAGAAGTTCAACGGATTAACCGTTCTGCCTCCTCTGCTGACTGACGAGATGATTGCTC |
| | | AGTATACTTCTGCCCTGCTGGCTGGAACTATTACCTCTGGCTGGACCTTCGGCGCCGGAGCTGCTCTGCAAATTCCC |
| | | TTCGCCATGCAAATGGCTTACAGATTTAACGGCATCGGAGTTACTCAAAACGTGCTGTACGAAAACCAAAAATTAATTG |
| | | CCAACCAGTTCAATTCCGCTATCGGCAAAATTCAGGATTCTCTGTCTTCTACTGCTTCCGCTTTAGGCAAACTGCAAGA |
| | | CGTTGTTAACCAGAACGCCCAAGCTTTAAACACCCTGGTTAAGCAGCTGTCCTCTAATTTTGGCGCTATCTCTTCTGTT |
| | | CTGAACGACATTTTATCTAGACTGGACCCCCCTGAAGCCGAGGTGCAGATTGATAGATTAATCACCGGAAGACTGCAA |
| | | TCCCTGCAGACCTACGTTACCCAGCAATTAATCAGAGCCGCCGAGATCAGAGCCTCTGCCAACTTAGCTGCCACCAA |
| | | AATGTCCGAGTGTGTGCTGGGACAGTCCAAGCGCGTGGACTTCTGTGGAAAGGGATACCACCTGATGTCTTTTCCTC |
| | | AATCTGCTCCCCACGGAGTTGTGTTTCTGCACGTTACTTACGTGCCTGCCCAAGAGAAAAACTTTACTACCGCCCCCG |
| | | CTATTTGCCACGACGGCAAGGCTCACTTCCCTAGAGAAGGAGTTTTTGTGTCTAACGGAACCCATTGGTTTGTGACTC |
| | | AAAGAAATTTTTACGAGCCTCAAATCATTACCACCGATAACACTTTTGTTTCCGGCAATTGTGACGTGGTGATTGGAAT |
| | | CGTTAACAACACCGTTTACGACCCTTTACAGCCCGAATTAGACTCTTTTAAAGAGGAGTTAGATAAATATTTTAAAAACC |
| | | ATACCTCTCCCGACGTGGACCTGGGAGATATTTCCGGAATTAACGCTTCTGTTGTGAATATCCAGAAAGAGATCGACA |
| | | GATTAAACGAGGTTGCTAAAAATTTAAACGAATCCCTGATTGACCTGCAGGAGCTGGGCAAATACGAACAATATATTAA |
| | | GTGGCCTTGGTATATTTGGTTAGGCTTCATCGCTGGATTAATCGCTATTGTTATGGTGACTATTATGTTGTGTTGTATG |
| | | ACTTCCTGCTGTTCTTGCTTAAAAGGCTGCTGTTCCTGCGGATCCTGTTGTAAATTCGACGAGGACGATTCCGAGCCT |
| | | GTTTTAAAAGGAGTGAAATTACATTATACTTAAATGAGACCATA |
| 256 | 2A6581 | ATAGGTCTCACACATTAAAACAGCCTGTGGGTTGATCCCACCCACAGGCCCATTGGGCGCTAGCACTCTGGTATCAC |
| | | GGTACCTTTGTGCGCCTGTTTTATACCCCCTCCCCCAACTGTAACTTAGAAGTAACACACACCGATCAACAGTCAGCG |
| | | TGGCACACCAGCCACGTTTTGATCAAGCACTTCTGTTACCCCGGACTGAGTATCAATAGACTGCTCACGCGGTTGAAG |
| | | GAGAAAGCGTTCGTTATCCGGCCAACTACTTCGAAAAACCTAGTAACACCGTGGAAGTTGCAGAGTGTTTCGCTCAGC |
| | | ACTACCCCAGTGTAGATCAGGTCGATGAGTCACCGCATTCCCCACGGGCGACCGTGGCGGTGGCTGCGTTGGCGGC |
| | | CTGCCCATGGGGAAACCCATGGGACGCTCTAATACAGACATGGTGCGAAGAGTCTATTGAGCTAGTTGGTAGTCCTC |
| | | CGGCCCCTGAATGCGGCTAATCCTAACTGCGGAGCACACACCCTCAAGCCAGAGGGCAGTGTGTCGTAACGGGCAA |
| | | CTCTGCAGCGGAACCGACTACTTTGGGTGTCCGTGTTTCATTTTATTCCTATACTGGCTGCTTATGGTGACAATTGAGA |
| | | GATCGTTACCATATAGCTATTGGATTGGCCATCCGGTGACTAATAGAGCTATTATATATCCCTTTGTTGGGTTTATACC |
| | | ACTTAGCTTGAAAGAGGTTAAAACATTACAATTCATTGTTAAGTTGAATACAGCAACATGTTCGTGTTCCTGGTGCTGC |
| | | TGCCCTTAGTGTCCTCCCAGTGTGTGAACCTGACCACCAGAACCCAGTTACCTCCCGCTTACACCAACTCCTTTACCC |
| | | GCGGAGTGTACTACCCTGATAAGGTTTTTAGATCCTCCGTTCTGCATTCTACCCAAGACCTGTTTTTACCCTTCTTTTC |
| | | CAACGTGACCTGGTTCCACGCTATCCACGTGTCCGGCACTAACGGCACTAAGCGCTTCGACAATCCTGTGCTCCCTT |
| | | TTAACGACGGCGTGTACTTCGCTTCTACCGAAAAATCCAACATCATCCGCGGCTGGATCTTCGGAACTACCCTGGATT |
| | | CTAAAACCCAGTCTTTATTAATCGTGAATAACGCCACCAACGTGGTTATTAAGGTCTGTGAGTTCCAATTTTGCAACGA |
| | | CCCTTTCTTAGGCGTTTATTACCACAAAAACAATAAGTCTTGGATGGAGTCCGAATTCCGCGTGTACTCCTCTGCCAAC |
| | | AATTGCACCTTTGAGTACGTGTCCCAGCCCTTCCTGATGGACCTGGAAGGCAAGCAGGGCAATTTTAAAAATCTGCGC |
| | | GAATTCGTTTTCAAGAACATCGACGGCTACTTTAAGATTTATTCCAAACATACCCCCATCAACCTGGTGCGCGATTTAC |
| | | CCCAGGGCTTCTCCGCCTTAGAGCCCTTAGTGGATCTGCCTATCGGCATCAATATCACCCGCTTTCAGACTCTGCTGG |
| | | CCCTGCACAGATCCTACCTGACTCCCGGAGACTCTTCTTCTGGCTGGACCGCCGGAGCTGCCGCCTACTACGTGGG |
| | | CTACCTGCAACCCCGCACCTTTCTGCTGAAGTACAACGAAAACGGCACCATCACAGACGCCGTTGACTGCGCTCTGG |
| | | ACCCCCTGTCTGAGACTAAGTGCACCCTGAAGTCCTTCACTGTGGAGAAAGGAATCTACCAGACCTCCAACTTCCGC |
| | | GTGCAGCCTACCGAATCCATTGTTCGCTTCCCTAACATTACTAATCTGTGCCCCTTCGGAGAAGTTTTCAACGCCACTA |
| | | GATTCGCTTCCGTGTACGCCTGGAATCGCAAGCGCATCTCCAATTGCGTTGCTGACTACTCTGTGTTATACAATTCCG |
| | | CCTCTTTTTCCACTTTCAAGTGCTACGGCGTGTCTCCTACCAAGCTGAACGACCTGTGTTTCACTAACGTGTACGCTG |
| | | ATTCCTTTGTTATCCGCGGCGACGAGGTGAGACAGATCGCCCCTGGCCAGACCGGAAAAATCGCCGACTACAACTAC |
| | | AAGTTACCCGACGATTTTACCGGCTGTGTTATTGCTTGGAACTCTAATAATCTGGACTCTAAAGTGGGGGGCAATTACA |
| | | ACTACTTATATCGCCTGTTCAGAAAATCCAACCTGAAACCCTTCGAACGGGACATTTCCACCGAAATTTATCAGGCCG |
| | | GCTCCACCCCCTGCAACGGAGTGGAGGGCTTCAATTGCTACTTCCCCCTGCAATCCTACGGCTTTCAGCCCACCAAC |
| | | GGCGTGGGATACCAGCCCTACCGCGTTGTTGTGTTATCCTTTGAACTGCTGCACGCTCCTGCTACTGTGTGCGGACC |
| | | TAAAAAATCCACCAATCTGGTGAAGAACAAGTGTGTGAATTTTAATTTTAACGGCCTGACCGGCACCGGAGTGCTGAC |
| | | CGAGTCCAACAAAAAGTTTCTGCCCTTTCAGCAGTTCGGCCGGGACATTGCCGACACTACCGACGCTGTGAGGGATC |
| | | CTCAGACCCTGGAGATTCTGGACATTACCCCTTGCTCCTTCGGAGGAGTTTCCGTGATCACCCCTGGCACCAATACTT |
| | | CTAACCAAGTGGCTGTTTTATACCAGGACGTGAATTGTACTGAGGTGCCTGTGGCCATCCACGCCGATCAATTAACTC |
| | | CCACCTGGAGAGTGTATTCCACCGGCTCTAACGTTTTCCAAACCCGCGCTGGCTGCTTAATCGGCGCTGAGCACGTG |
| | | AACAACTCCTACGAGTGTGATATTCCTATCGGAGCCGGCATCTGTGCTTCCTACCAGACTCAGACCAACTCCCCCAGA |
| | | CGCGCTAGGTCCGTGGCTTCCCAGTCTATTATCGCTTATACTATGTCCCTGGGAGCCGAGAATTCTGTTGCCTATTCC |
| | | AATAACTCCATCGCCATTCCTACCAACTTTACCATCTCTGTGACCACCGAGATTCTGCCCGTGTCCATGACCAAAACTT |
| | | CTGTGGATTGTACCATGTACATCTGTGGAGATTCCACCGAGTGCTCTAACCTGCTGCTGCAGTACGGCTCCTTTTGCA |
| | | CCCAATTAAACCGCGCTCTGACTGGCATCGCCGTGGAGCAAGATAAAAACACCCAAGAGGTGTTCGCTCAGGTGAAG |
| | | CAGATCTACAAGACACCTCCCATTAAAGATTTCGGAGGCTTTAATTTCTCTCAGATCCTGCCCGACCCTTCTAAGCCCT |
| | | CTAAACGCTCCTTCATCGAGGATCTGCTGTTCAACAAGGTTACCCTGGCCGACGCTGGCTTTATCAAACAGTACGGCG |
| | | ACTGCTTAGGCGACATCGCCGCCCGCGATTTAATTTGCGCTCAGAAGTTCAACGGACTGACCGTGCTGCCTCCTCTG |
| | | CTGACCGACGAAATGATCGCCCAATACACCTCCGCCCTGCTGGCTGGCACTATCACCTCCGGCTGGACCTTTGGCGC |
| | | TGGAGCCGCTCTGCAAATCCCTTTCGCTATGCAGATGGCTTACCGCTTTAACGGAATCGGCGTGACCCAGAACGTGT |
| | | TATACGAAAATCAGAAATTAATTGCCAATCAATTTAACTCTGCCATCGGCAAGATTCAGGATTCTCTGTCTTCTACTGCC |
| | | TCTGCCTTAGGAAAACTGCAGGACGTGGTGAATCAGAACGCCCAGGCCCTGAATACCCTGGTTAAGCAACTGTCTTC |
| | | CAATTTCGGCGCTATCTCCTCTGTGTTAAACGACATTCTGTCCCGCCTGGATCCTCCTGAGGCCGAAGTGCAAATTGA |
| | | CCGCTTAATCACTGGCAGACTGCAATCCCTGCAAACCTACGTTACTCAACAGCTGATCAGAGCCGCCGAAATCCGCG |
| | | CTTCTGCCAACTTAGCTGCTACCAAGATGTCCGAGTGCGTGCTGGGACAGTCCAAAAGAGTTGACTTTTGCGGAAAG |
| | | GGCTACCACCTGATGTCCTTTCCCCAGTCCGCCCCCCACGGAGTTGTTTTCCTGCACGTTACTTACGTTCCTGCTCAA |
| | | GAGAAGAACTTCACCACCGCTCCCGCTATTTGCCACGACGGCAAGGCTCATTTCCCCAGAGAGGGAGTGTTTGTGTC |
| | | CAACGGCACTCACTGGTTTGTTACTCAGCGCAACTTCTACGAACCTCAGATCATCACCACTGACAATACCTTTGTGTC |
| | | CGGAAACTGTGACGTGGTTATCGGCATTGTGAACAATACTGTGTACGACCCTTTACAACCTGAGCTGGATTCTTTTAAA |
| | | GAAGAACTGGACAAGTACTTCAAGAACCACACCTCCCCCGACGTGGATCTGGGCGACATCTCCGGCATCAACGCCTC |
| | | TGTGGTGAATATTCAGAAGGAGATTGATCGCCTGAACGAGGTTGCCAAGAATCTGAACGAGTCTCTGATCGACCTGCA |
| | | GGAGCTGGGCAAGTACGAACAGTACATCAAGTGGCCCTGGTACATTTGGCTGGGCTTTATTGCTGGACTGATCGCTA |
| | | TCGTTATGGTTACCATCATGCTGTGCTGTATGACCTCTTGCTGCTCCTGTCTGAAAGGCTGTTGCTCCTGCGGCTCCT |
| | | GTTGTAAGTTTGACGAGGACGACTCCGAGCCTGTTCTGAAAGGAGTTAAACTGCACTACACCTAAATGAGACCATA |
| 257 | 2A7581 | ATAGGTCTCACACATTAAAACAGCCTGTGGGTTGATCCCACCCACAGGCCCATTGGGCGCTAGCACTCTGGTATCAC |
| | | GGTACCTTTGTGCGCCTGTTTTATACCCCCTCCCCCAACTGTAACTTAGAAGTAACACACACCGATCAACAGTCAGCG |
| | | TGGCACACCAGCCACGTTTTGATCAAGCACTTCTGTTACCCCGGACTGAGTATCAATAGACTGCTCACGCGGTTGAAG |
| | | GAGAAAGCGTTCGTTATCCGGCCAACTACTTCGAAAAACCTAGTAACACCGTGGAAGTTGCAGAGTGTTTCGCTCAGC |
| | | ACTACCCCAGTGTAGATCAGGTCGATGAGTCACCGCATTCCCCACGGGCGACCGTGGCGGTGGCTGCGTTGGCGGC |
| | | CTGCCCATGGGGAAACCCATGGGACGCTCTAATACAGACATGGTGCGAAGAGTCTATTGAGCTAGTTGGTAGTCCTC |
| | | CGGCCCCTGAATGCGGCTAATCCTAACTGCGGAGCACACACCCTCAAGCCAGAGGGCAGTGTGTCGTAACGGGCAA |
| | | CTCTGCAGCGGAACCGACTACTTTGGGTGTCCGTGTTTCATTTTATTCCTATACTGGCTGCTTATGGTGACAATTGAGA |
| | | GATCGTTACCATATAGCTATTGGATTGGCCATCCGGTGACTAATAGAGCTATTATATATCCCTTTGTTGGGTTTATACC |
| | | ACTTAGCTTGAAAGAGGTTAAAACATTACAATTCATTGTTAAGTTGAATACAGCAACATGTTTGTGTTTCTGGTGCTGCT |
| | | GCCTCTGGTGTCCTCTCAGTGTGTTAACCTGACCACCAGAACCCAACTGCCCCCCGCCTACACTAACTCTTTCACTCG |
| | | CGGCGTGTACTACCCCGATAAAGTTTTCAGATCCTCCGTGCTCCATTCTACCCAAGACCTGTTCTTACCCTTTTTCTCC |
| | | AACGTGACCTGGTTCCACGCCATCCACGTGTCCGGCACTAACGGAACCAAGCGCTTCGATAATCCCGTGCTGCCTTT |
| | | CAACGACGGAGTTTACTTTGCTTCCACCGAGAAGTCCAATATTATCCGGGGCTGGATCTTCGGCACCACACTGGATTC |
| | | CAAAACCCAGTCCTTACTGATTGTGAACAACGCCACTAACGTGGTGATCAAGGTGTGTGAGTTCCAGTTCTGTAACGA |
| | | CCCCTTTCTGGGCGTGTATTATCATAAAAACAACAAGTCCTGGATGGAGTCCGAGTTTAGAGTGTATTCTTCCGCTAAC |
| | | AACTGCACCTTCGAATACGTGTCCCAGCCTTTCCTGATGGATCTGGAAGGAAAGCAGGGCAACTTCAAGAACTTACGC |
| | | GAGTTCGTGTTCAAGAACATCGACGGCTACTTCAAAATTTACTCCAAGCACACCCCTATCAACTTAGTGAGAGATCTG |
| | | CCCCAGGGCTTCTCCGCTCTGGAACCTCTGGTGGACTTACCCATTGGCATCAACATCACTCGCTTCCAAACACTGCTC |
| | | GCTCTGCACCGCTCTTATCTGACCCCCGGCGACTCCTCTTCTGGCTGGACCGCCGGCGCCGCTGCCTATTACGTGG |
| | | GATACCTGCAACCCCGCACCTTTCTGCTGAAATACAACGAAAACGGCACCATCACAGACGCTGTGGACTGCGCTCTG |
| | | GACCCCCTGTCCGAGACTAAGTGCACCCTGAAGTCCTTCACCGTTGAAAAGGGCATTTATCAGACTTCCAACTTCCGC |
| | | GTGCAGCCTACTGAGTCCATTGTGCGCTTCCCTAACATCACTAACTTGTGTCCTTTCGGCGAAGTGTTCAACGCTACT |
| | | CGCTTCGCCTCCGTGTACGCCTGGAACCGCAAGAGAATCTCCAATTGCGTGGCCGACTACTCTGTTCTCTACAACTCT |
| | | GCCTCCTTCTCCACCTTTAAGTGCTACGGCGTGTCCCCCACCAAACTGAACGACCTGTGCTTCACCAACGTGTACGC |
| | | CGACTCCTTTGTGATCAGAGGCGACGAGGTGCGCCAGATCGCCCCCGGCCAGACTGGCAAGATCGCCGATTACAAT |
| | | TACAAGCTGCCTGACGACTTTACCGGCTGCGTGATTGCCTGGAACTCCAACAACCTGGACTCCAAAGTGGGCGGCAA |
| | | CTACAACTACCTGTACCGCCTGTTTAGAAAATCCAACCTGAAGCCCTTCGAGCGGGACATTTCTACTGAGATCTACCA |
| | | GGCCGGCTCCACCCCCTGTAACGGCGTGGAAGGCTTCAACTGCTACTTTCCCCTGCAGTCCTACGGCTTCCAGCCTA |
| | | CCAACGGCGTGGGCTACCAGCCCTACCGCGTGGTGGTGTTATCCTTCGAGCTGCTGCACGCCCCTGCCACCGTGTG |
| | | CGGACCCAAAAAGTCTACTAACCTGGTTAAGAATAAGTGTGTTAATTTCAATTTTAACGGCTTAACCGGAACCGGAGTG |
| | | CTGACCGAGTCCAATAAAAAGTTCCTGCCCTTTCAGCAGTTTGGCCGCGACATCGCCGATACTACCGACGCCGTGCG |
| | | CGATCCCCAGACCCTGGAGATCCTGGACATTACCCCCTGCTCTTTCGGCGGAGTGTCCGTGATCACCCCCGGCACCA |
| | | ATACCTCCAATCAGGTGGCCGTTCTGTACCAGGACGTGAATTGCACCGAAGTGCCCGTGGCCATTCACGCCGACCAG |
| | | TTAACTCCTACTTGGAGAGTGTACTCCACCGGCTCTAACGTGTTTCAGACCCGCGCCGGCTGTCTGATCGGCGCCGA |
| | | GCACGTGAACAACTCCTACGAGTGCGACATTCCCATTGGCGCCGGCATCTGCGCCTCCTACCAAACCCAGACTAACT |
| | | CTCCCAGACGCGCCCGCTCTGTGGCCTCTCAGTCCATCATCGCTTACACTATGTCCCTGGGCGCCGAGAACTCCGTG |
| | | GCCTATTCCAACAACTCCATCGCCATCCCCACTAACTTCACCATCTCTGTGACCACCGAAATCCTCCCCGTGTCTATG |
| | | ACTAAGACTTCCGTGGACTGTACCATGTACATTTGCGGCGACTCCACCGAGTGTTCCAATCTGCTGCTGCAGTACGG |
| | | CTCCTTTTGCACCCAGCTGAACCGCGCCCTGACCGGCATCGCTGTTGAGCAGGACAAGAATACCCAGGAGGTGTTTG |
| | | CTCAGGTGAAGCAAATCTATAAGACCCCTCCCATCAAGGACTTTGGCGGCTTCAACTTTTCCCAGATCCTGCCCGACC |
| | | CTTCCAAGCCCTCCAAACGCTCTTTCATCGAAGATCTGCTGTTCAATAAAGTGACCCTGGCCGACGCCGGCTTCATCA |
| | | AGCAGTACGGAGACTGTCTGGGAGACATTGCTGCTCGCGACCTGATTTGCGCCCAGAAGTTCAACGGCCTGACCGT |
| | | GCTGCCCCCTCTGCTGACCGACGAGATGATCGCTCAGTACACCTCCGCCCTGCTGGCTGGCACTATCACCTCCGGCT |
| | | GGACTTTCGGCGCTGGCGCCGCCCTGCAGATTCCCTTCGCCATGCAGATGGCTTATCGCTTCAACGGAATCGGAGTG |
| | | ACACAGAACGTGCTGTACGAGAATCAGAAACTGATCGCTAACCAGTTTAATTCCGCCATTGGCAAGATCCAGGACTCC |
| | | CTGTCCTCTACTGCTTCCGCCCTGGGCAAGCTGCAGGACGTGGTGAACCAGAACGCCCAGGCTCTGAACACCCTGG |
| | | TGAAGCAACTGTCTTCTAACTTTGGAGCCATTTCTTCCGTGCTGAACGACATCCTGTCCAGACTGGATCCTCCTGAGG |
| | | CCGAGGTGCAGATCGACCGCCTGATCACTGGCCGCCTGCAGTCCCTGCAGACTTACGTTACCCAGCAATTAATCCGC |
| | | GCTGCCGAGATCCGCGCCTCCGCCAACCTGGCCGCCACCAAGATGTCCGAGTGCGTTCTGGGCCAGTCCAAACGCG |
| | | TTGACTTCTGCGGCAAGGGCTACCACCTGATGTCCTTCCCCCAGTCCGCTCCCCACGGAGTGGTGTTCCTGCACGTG |
| | | ACCTACGTGCCTGCCCAGGAGAAGAACTTCACCACCGCCCCCGCCATTTGCCACGACGGAAAGGCCCACTTCCCCC |
| | | GCGAGGGAGTGTTCGTTTCTAACGGCACTCACTGGTTCGTGACCCAGAGAAACTTCTACGAGCCCCAGATTATTACCA |
| | | CCGACAATACCTTCGTTTCTGGCAACTGCGACGTGGTTATCGGCATCGTGAACAACACCGTGTACGACCCCCTGCAA |
| | | CCCGAGCTGGATTCTTTCAAGGAGGAGCTGGATAAGTACTTTAAAAACCATACCTCCCCCGACGTGGACCTGGGCGA |
| | | CATCTCTGGCATCAACGCCTCCGTGGTGAATATCCAGAAGGAGATCGATCGCCTGAACGAGGTGGCCAAGAACTTAA |
| | | ACGAATCTCTGATCGACCTGCAGGAGCTGGGCAAGTACGAGCAGTATATTAAGTGGCCCTGGTATATCTGGTTAGGC |
| | | TTTATCGCCGGCCTGATCGCCATTGTTATGGTGACCATCATGCTGTGCTGCATGACCTCCTGCTGTTCCTGTTTAAAA |
| | | GGCTGCTGCTCCTGCGGATCCTGCTGTAAATTCGACGAAGACGACTCCGAGCCCGTGCTGAAAGGAGTTAAGTTACA |
| | | CTATACCTAAATGAGACCATA |
| 258 | 2A8581 | ATAGGTCTCACACATTAAAACAGCCTGTGGGTTGATCCCACCCACAGGCCCATTGGGCGCTAGCACTCTGGTATCAC |
| | | GGTACCTTTGTGCGCCTGTTTTATACCCCCTCCCCCAACTGTAACTTAGAAGTAACACACACCGATCAACAGTCAGCG |
| | | TGGCACACCAGCCACGTTTTGATCAAGCACTTCTGTTACCCCGGACTGAGTATCAATAGACTGCTCACGCGGTTGAAG |
| | | GAGAAAGCGTTCGTTATCCGGCCAACTACTTCGAAAAACCTAGTAACACCGTGGAAGTTGCAGAGTGTTTCGCTCAGC |
| | | ACTACCCCAGTGTAGATCAGGTCGATGAGTCACCGCATTCCCCACGGGCGACCGTGGCGGTGGCTGCGTTGGCGGC |
| | | CTGCCCATGGGGAAACCCATGGGACGCTCTAATACAGACATGGTGCGAAGAGTCTATTGAGCTAGTTGGTAGTCCTC |
| | | CGGCCCCTGAATGCGGCTAATCCTAACTGCGGAGCACACACCCTCAAGCCAGAGGGCAGTGTGTCGTAACGGGCAA |
| | | CTCTGCAGCGGAACCGACTACTTTGGGTGTCCGTGTTTCATTTTATTCCTATACTGGCTGCTTATGGTGACAATTGAGA |
| | | GATCGTTACCATATAGCTATTGGATTGGCCATCCGGTGACTAATAGAGCTATTATATATCCCTTTGTTGGGTTTATACC |
| | | ACTTAGCTTGAAAGAGGTTAAAACATTACAATTCATTGTTAAGTTGAATACAGCAACATGTTCGTGTTCCTGGTGCTGC |
| | | TGCCCCTGGTGTCCTCCCAGTGCGTCAACCTGACCACCCGGACCCAACTGCCCCCTGCCTATACCAATTCCTTCACC |
| | | CGGGGCGTCTACTACCCCGACAAGGTGTTCCGGTCCTCTGTGCTCCACTCCACCCAGGACCTCTTCCTCCCCTTTTT |
| | | CTCCAACGTGACCTGGTTCCACGCCATCCACGTGTCTGGCACAAACGGAACCAAGCGCTTCGACAACCCTGTGCTCC |
| | | CCTTCAACGACGGCGTGTACTTCGCCTCCACCGAGAAGTCCAACATCATCCGCGGCTGGATCTTCGGCACCACCCTC |
| | | GACTCTAAGACCCAGTCCCTGCTGATTGTGAATAACGCCACCAACGTGGTGATCAAGGTGTGCGAATTTCAGTTCTGC |
| | | AACGACCCCTTCCTGGGCGTTTACTACCATAAGAACAACAAGTCCTGGATGGAGTCCGAGTTCCGGGTGTATTCCTCT |
| | | GCCAATAACTGCACCTTTGAGTACGTGTCCCAGCCCTTCCTGATGGACCTGGAGGGCAAGCAGGGCAATTTTAAAAA |
| | | CCTGCGCGAGTTCGTGTTCAAGAACATCGACGGCTACTTCAAGATCTATTCCAAGCACACCCCTATCAACCTGGTGCG |
| | | CGACCTGCCCCAGGGCTTTTCCGCTCTGGAGCCCCTGGTTGACCTGCCCATCGGCATCAACATCACCCGCTTCCAGA |
| | | CTTTACTGGCCCTGCACCGCTCCTACCTGACCCCCGGCGATTCCTCTTCTGGCTGGACAGCCGGAGCCGCTGCCTAC |
| | | TACGTGGGATACCTGCAGCCCCGCACCTTCCTGCTGAAGTACAACGAGAACGGAACCATTACAGACGCTGTCGACTG |
| | | TGCTCTGGATCCCCTGTCCGAAACAAAGTGCACCCTGAAGTCCTTCACCGTGGAGAAGGGCATCTACCAGACCTCCA |
| | | ACTTCCGCGTGCAGCCCACCGAGTCCATCGTGAGATTCCCCAACATCACTAACCTGTGCCCCTTCGGCGAGGTGTTC |
| | | AACGCCACCCGCTTCGCCTCCGTGTACGCCTGGAACCGCAAGCGCATCTCCAACTGCGTTGCCGACTACTCTGTGCT |
| | | CTACAACTCCGCCTCCTTCTCCACCTTCAAGTGCTACGGCGTGTCCCCCACCAAGCTGAACGACCTGTGCTTCACCAA |
| | | CGTGTACGCCGACTCCTTCGTGATCCGCGGCGACGAGGTGCGCCAGATCGCCCCCGGCCAGACCGGAAAGATCGC |
| | | CGATTACAATTACAAGCTGCCCGACGACTTCACCGGCTGCGTGATCGCCTGGAACTCCAACAATCTGGACTCCAAGG |
| | | TTGGCGGCAACTACAACTACCTGTACCGCCTGTTCCGCAAGTCCAACCTGAAGCCCTTCGAGCGGGACATTTCCACA |
| | | GAGATTTACCAGGCTGGCTCCACCCCCTGTAACGGAGTGGAGGGCTTCAACTGCTACTTCCCCCTGCAGTCCTACGG |
| | | CTTCCAGCCCACCAACGGCGTGGGCTACCAGCCCTACCGCGTGGTGGTGCTGTCCTTCGAGCTGCTGCACGCCCCT |
| | | GCCACCGTGTGCGGCCCCAAGAAGTCCACCAACCTGGTGAAGAACAAGTGCGTGAACTTCAACTTCAACGGACTGAC |
| | | AGGCACCGGCGTGCTGACCGAGTCCAACAAGAAGTTCCTGCCCTTCCAGCAGTTCGGCCGGGACATTGCCGACACC |
| | | ACCGACGCCGTGCGCGACCCCCAGACCCTGGAGATCCTGGACATCACCCCCTGCTCCTTCGGCGGAGTGTCCGTGA |
| | | TCACCCCCGGCACCAACACCTCCAACCAGGTTGCCGTGCTGTACCAGGACGTTAACTGCACCGAGGTGCCCGTGGC |
| | | CATCCACGCCGACCAGCTGACCCCCACCTGGCGCGTGTACTCCACCGGCTCCAACGTGTTCCAGACCCGCGCCGGC |
| | | TGCCTGATCGGCGCCGAGCACGTGAACAACTCCTACGAGTGCGACATCCCCATTGGCGCCGGCATCTGCGCCTCCT |
| | | ACCAGACCCAGACCAACTCCCCTCGCCGCGCCCGGTCCGTCGCCTCCCAGTCCATCATCGCCTACACCATGTCCCT |
| | | GGGCGCCGAGAACTCCGTGGCCTACTCCAACAACTCCATTGCCATCCCCACCAACTTCACCATCTCCGTGACCACCG |
| | | AAATCCTCCCCGTGTCCATGACCAAGACCTCCGTGGACTGCACCATGTACATCTGCGGCGACTCCACCGAGTGCTCC |
| | | AACCTGCTGCTGCAGTACGGCTCCTTCTGCACCCAGCTGAATCGCGCCCTGACCGGCATCGCCGTGGAGCAGGACA |
| | | AGAACACCCAAGAGGTGTTCGCCCAGGTGAAGCAGATCTACAAGACACCTCCCATCAAGGACTTCGGCGGCTTCAAC |
| | | TTCTCCCAGATCCTGCCCGACCCCTCCAAGCCCTCCAAGCGCTCCTTCATCGAGGACCTGCTGTTCAACAAGGTGAC |
| | | CCTGGCCGACGCCGGCTTCATCAAGCAGTACGGCGACTGTCTGGGAGACATTGCCGCCCGCGACCTGATCTGCGCC |
| | | CAGAAGTTCAACGGCTTAACCGTGCTGCCCCCTCTGCTGACCGACGAGATGATCGCCCAGTACACATCCGCTCTGCT |
| | | GGCCGGCACCATCACCTCCGGCTGGACCTTTGGCGCTGGCGCTGCCCTGCAGATCCCCTTCGCTATGCAGATGGCC |
| | | TACCGCTTCAACGGCATCGGCGTGACCCAGAACGTGCTGTACGAGAACCAGAAGCTGATCGCCAACCAGTTCAACTC |
| | | CGCCATCGGCAAGATCCAGGACTCCCTGTCCTCCACCGCCTCCGCCCTGGGCAAGCTGCAGGACGTGGTGAACCAG |
| | | AACGCCCAGGCCCTGAACACCCTGGTGAAGCAGCTGTCCTCTAACTTCGGCGCCATCTCCTCCGTGCTGAACGACAT |
| | | TCTGTCCCGCCTGGATCCTCCTGAGGCCGAGGTGCAAATCGATCGCCTCATCACCGGCCGCCTGCAGTCCCTGCAG |
| | | ACCTACGTGACACAGCAGCTGATCCGCGCCGCCGAGATCCGCGCCTCCGCCAACCTGGCCGCCACCAAGATGTCTG |
| | | AGTGCGTGCTGGGCCAGTCCAAACGCGTTGACTTCTGCGGCAAGGGCTACCACCTGATGTCCTTCCCCCAGTCCGC |
| | | CCCCCACGGCGTGGTGTTCCTGCACGTGACCTACGTGCCCGCCCAGGAGAAGAACTTCACTACCGCCCCCGCCATC |
| | | TGCCACGACGGCAAGGCCCACTTCCCCCGCGAGGGCGTGTTCGTGTCCAACGGCACCCACTGGTTCGTGACCCAGC |
| | | GCAACTTCTACGAGCCCCAGATCATCACCACCGACAACACCTTCGTGTCCGGCAACTGCGACGTGGTGATTGGCATC |
| | | GTGAACAACACCGTGTACGACCCCCTGCAGCCCGAGCTGGACTCCTTCAAGGAGGAGCTGGACAAGTACTTTAAGAA |
| | | CCACACCTCCCCCGACGTGGACCTGGGCGACATCTCCGGCATCAACGCCTCCGTGGTGAACATCCAGAAGGAGATC |
| | | GACCGCCTGAACGAGGTGGCCAAGAACCTGAACGAGTCCCTGATCGACCTGCAGGAGCTGGGCAAGTACGAACAGT |
| | | ACATCAAGTGGCCCTGGTACATCTGGCTGGGCTTCATCGCCGGCCTGATCGCCATCGTGATGGTGACCATCATGCTG |
| | | TGCTGCATGACCTCTTGCTGTTCCTGTCTGAAGGGCTGCTGCTCCTGCGGCTCCTGCTGCAAGTTCGACGAGGACGA |
| | | CTCCGAGCCCGTGCTGAAGGGCGTGAAGCTGCACTACACCTAAATGAGACCATA |
| 259 | 2A9581 | ATAGGTCTCACACATTAAAACAGCCTGTGGGTTGATCCCACCCACAGGCCCATTGGGCGCTAGCACTCTGGTATCAC |
| | | GGTACCTTTGTGCGCCTGTTTTATACCCCCTCCCCCAACTGTAACTTAGAAGTAACACACACCGATCAACAGTCAGCG |
| | | TGGCACACCAGCCACGTTTTGATCAAGCACTTCTGTTACCCCGGACTGAGTATCAATAGACTGCTCACGCGGTTGAAG |
| | | GAGAAAGCGTTCGTTATCCGGCCAACTACTTCGAAAAACCTAGTAACACCGTGGAAGTTGCAGAGTGTTTCGCTCAGC |
| | | ACTACCCCAGTGTAGATCAGGTCGATGAGTCACCGCATTCCCCACGGGCGACCGTGGCGGTGGCTGCGTTGGCGGC |
| | | CTGCCCATGGGGAAACCCATGGGACGCTCTAATACAGACATGGTGCGAAGAGTCTATTGAGCTAGTTGGTAGTCCTC |
| | | CGGCCCCTGAATGCGGCTAATCCTAACTGCGGAGCACACACCCTCAAGCCAGAGGGCAGTGTGTCGTAACGGGCAA |
| | | CTCTGCAGCGGAACCGACTACTTTGGGTGTCCGTGTTTCATTTTATTCCTATACTGGCTGCTTATGGTGACAATTGAGA |
| | | GATCGTTACCATATAGCTATTGGATTGGCCATCCGGTGACTAATAGAGCTATTATATATCCCTTTGTTGGGTTTATACC |
| | | ACTTAGCTTGAAAGAGGTTAAAACATTACAATTCATTGTTAAGTTGAATACAGCAACATGTTCGTGTTCCTGGTGCTGC |
| | | TCCCCCTGGTGAGCTCCCAGTGCGTCAACCTGACCACACGGACCCAGCTGCCCCCCGCCTATACCAACAGCTTCACC |
| | | CGCGGCGTCTACTACCCCGACAAGGTGTTCCGGAGCAGCGTGCTGCACAGCACCCAGGACCTCTTCCTCCCCTTTTT |
| | | TAGCAACGTGACCTGGTTCCACGCCATCCACGTGAGTGGCACCAACGGCACCAAGCGGTTCGACAACCCTGTGCTC |
| | | CCCTTCAACGACGGCGTGTACTTCGCTAGCACAGAAAAAAGTAACATCATTCGGGGCTGGATCTTCGGCACCACACT |
| | | GGATAGCAAAACCCAGAGCCTGCTGATTGTGAATAACGCCACCAACGTGGTGATCAAGGTGTGCGAGTTCCAGTTCT |
| | | GCAACGACCCCTTCCTGGGCGTGTACTACCACAAGAACAACAAGAGCTGGATGGAGAGCGAGTTCCGCGTGTATAGC |
| | | TCTGCCAACAACTGCACCTTCGAGTACGTGAGCCAGCCCTTCCTGATGGACCTGGAGGGCAAGCAGGGCAATTTCAA |
| | | AAACCTGCGGGAGTTCGTGTTCAAGAACATCGACGGCTACTTCAAGATCTACAGCAAGCACACCCCCATCAACCTGG |
| | | TGCGGGACCTGCCCCAGGGCTTTAGCGCTCTGGAGCCCCTGGTGGACCTGCCCATCGGCATCAACATCACCCGCTT |
| | | CCAAACCCTGTTGGCCCTGCACCGGAGCTACCTGACCCCTGGCGATAGCAGTAGTGGCTGGACAGCCGGAGCCGCC |
| | | GCCTACTACGTGGGATACCTGCAGCCCCGGACCTTCCTGCTGAAGTACAACGAGAACGGCACAATCACAGACGCCGT |
| | | GGACTGCGCCCTGGACCCCCTGAGCGAAACAAAGTGCACCCTCAAAAGTTTCACCGTGGAGAAGGGCATCTACCAG |
| | | ACCAGCAACTTCCGGGTGCAGCCCACCGAGAGCATCGTGCGGTTCCCCAACATCACCAACCTGTGCCCCTTCGGCG |
| | | AGGTGTTCAACGCCACCCGGTTCGCCAGCGTGTACGCCTGGAACCGGAAGCGGATCAGCAACTGCGTGGCCGACTA |
| | | CAGCGTGCTGTATAACAGTGCCAGCTTCAGCACCTTCAAGTGCTACGGCGTGAGCCCCACCAAGCTGAACGACCTGT |
| | | GCTTCACCAACGTGTACGCCGACAGCTTCGTGATCCGGGGCGACGAGGTGCGGCAGATCGCCCCCGGCCAGACCG |
| | | GCAAGATCGCCGATTACAATTACAAGCTGCCCGACGATTTCACCGGCTGCGTGATCGCCTGGAACAGCAACAACCTG |
| | | GACAGCAAGGTGGGCGGCAACTACAACTACCTGTACCGGCTGTTCCGCAAAAGTAACCTGAAGCCCTTCGAGCGGG |
| | | ACATCAGCACCGAGATCTACCAGGCCGGCAGTACCCCTTGCAACGGCGTCGAGGGCTTCAACTGCTACTTCCCCCTG |
| | | CAGAGCTACGGCTTCCAGCCCACCAACGGCGTGGGCTACCAGCCCTACCGGGTGGTGGTTCTGAGCTTCGAGCTGC |
| | | TGCACGCCCCTGCCACCGTGTGCGGCCCCAAGAAAAGCACCAACCTGGTGAAGAACAAGTGCGTGAATTTCAATTTT |
| | | AACGGACTCACCGGAACCGGCGTGCTGACCGAGAGCAACAAGAAGTTCCTGCCCTTCCAGCAATTCGGCCGGGATA |
| | | TTGCCGACACCACTGACGCCGTGCGGGACCCCCAGACCCTGGAGATCCTGGACATCACACCCTGTAGCTTCGGCGG |
| | | GGTGAGCGTGATCACCCCCGGCACCAACACCAGCAACCAGGTGGCCGTGCTGTACCAGGACGTGAACTGCACCGAG |
| | | GTGCCCGTGGCCATCCACGCCGACCAGCTGACCCCCACCTGGCGGGTGTACAGCACCGGCAGCAACGTGTTCCAGA |
| | | CCCGGGCCGGCTGCCTGATCGGCGCCGAGCACGTGAATAACAGCTACGAGTGCGACATCCCCATCGGAGCCGGAAT |
| | | CTGCGCCAGCTACCAGACCCAGACCAACAGCCCCCGGAGAGCCCGGAGCGTGGCCAGCCAGAGCATTATTGCCTAC |
| | | ACCATGAGCCTGGGCGCCGAGAACAGCGTGGCCTACAGCAACAATAGTATTGCCATCCCCACCAACTTCACCATCAG |
| | | CGTGACCACCGAAATCCTCCCCGTGAGCATGACCAAGACCAGCGTGGACTGCACCATGTACATCTGCGGCGACAGC |
| | | ACCGAGTGCAGCAACCTGCTCCTGCAGTACGGCAGCTTCTGCACCCAGCTGAACCGGGCCCTGACCGGAATTGCCG |
| | | TGGAGCAGGACAAGAACACCCAGGAGGTGTTCGCCCAGGTGAAGCAGATCTACAAGACACCTCCCATCAAGGACTTC |
| | | GGCGGCTTCAACTTCAGCCAGATCCTGCCCGACCCCAGCAAGCCCAGCAAGCGGAGCTTCATCGAGGACCTGTTGT |
| | | TCAACAAGGTGACCCTGGCCGACGCCGGCTTCATCAAGCAGTACGGCGACTGTCTGGGAGATATTGCCGCACGGGA |
| | | CCTGATCTGCGCCCAGAAGTTCAACGGCCTGACCGTGCTGCCCCCACTGCTGACCGACGAGATGATCGCCCAGTAC |
| | | ACAAGCGCTCTGCTCGCCGGCACCATCACCAGCGGCTGGACCTTCGGCGCCGGCGCTGCCCTGCAGATCCCCTTCG |
| | | CCATGCAGATGGCCTACCGGTTCAACGGCATCGGCGTGACCCAGAACGTGCTGTACGAGAACCAGAAGCTGATCGC |
| | | CAACCAGTTCAACAGCGCCATCGGCAAGATCCAGGACAGCCTGAGCTCCACCGCCAGCGCCCTGGGCAAGCTGCAG |
| | | GACGTGGTGAACCAGAACGCCCAGGCCCTGAACACCCTGGTGAAGCAGCTGAGCAGCAACTTCGGCGCCATCAGCT |
| | | CTGTGCTGAACGACATCCTGAGCCGGCTGGATCCTCCTGAGGCCGAGGTGCAAATCGATCGGCTCATCACCGGCCG |
| | | GCTGCAGAGCCTGCAGACCTACGTGACACAGCAGCTGATCCGGGCCGCCGAGATCCGGGCCAGCGCCAACCTGGC |
| | | CGCTACCAAGATGAGCGAGTGCGTGCTGGGCCAGAGCAAGCGGGTGGACTTCTGCGGCAAGGGCTACCACCTGATG |
| | | AGCTTCCCCCAGAGCGCCCCCCACGGCGTGGTGTTCCTGCACGTGACCTACGTGCCCGCCCAGGAGAAGAACTTCA |
| | | CCACCGCCCCCGCCATCTGCCACGACGGCAAGGCCCACTTCCCCCGGGAGGGCGTGTTCGTGAGCAACGGCACCC |
| | | ACTGGTTCGTGACCCAGCGGAACTTCTACGAGCCCCAGATCATAACCACAGACAACACCTTCGTGAGCGGCAACTGC |
| | | GACGTGGTCATCGGCATCGTGAACAACACCGTGTACGACCCCCTGCAGCCCGAGCTGGACAGCTTCAAGGAGGAAC |
| | | TGGACAAGTACTTCAAGAACCACACCAGCCCCGACGTGGACCTGGGCGACATCAGCGGCATCAACGCCAGCGTGGT |
| | | GAACATCCAGAAGGAGATCGACCGGCTGAACGAGGTGGCCAAGAACCTGAACGAGAGCCTGATCGACCTGCAGGAG |
| | | CTGGGCAAGTACGAGCAGTACATCAAGTGGCCCTGGTACATCTGGCTGGGCTTTATTGCCGGCCTGATCGCCATCGT |
| | | GATGGTGACCATCATGCTGTGCTGTATGACAAGCTGTTGCAGTTGCCTGAAGGGCTGCTGCAGCTGCGGCAGCTGCT |
| | | GCAAGTTCGACGAGGACGACAGCGAGCCCGTGCTGAAGGGCGTGAAGCTGCACTACACCTAAATGAGACCATA |
| 260 | 2A0681 | ATAGGTCTCACACACTAGGGCGCGCCAGTCCTCAAGCTGGGCCTGACACAACTGTGTTCACTAGCAACTACTCCCAG |
| | | ACACCATGGTACTCCCGACTCCTGAGGTACTCCCTGCCGTTACTGCCCTGTGGGGCAAGGTGATACTCCCTGAAGTT |
| | | GGTGGTGAGGCCCTGGGCAGGCTACTCCCGGTCTACCCTTGGACCCAGAGGTCGACTCGGACCGGCCACCATGTTT |
| | | GTTTTCTTAGTTTTATTACCTTTAGTTTCTTCCCAGTGTGTTAATTTAACTACTAGAACTCAATTACCTCCTGCTTATACT |
| | | AATTCTTTTACTAGAGGAGTGTATTATCCTGATAAGGTTTTTAGATCTTCTGTTCTGCACTCTACTCAGGATTTGTTCTT |
| | | GCCCTTCTTCTCTAACGTGACCTGGTTCCACGCTATTCACGTTTCTGGAACCAACGGCACTAAGAGATTTGATAATCC |
| | | CGTTTTGCCTTTTAACGACGGAGTTTATTTCGCCTCTACCGAAAAATCTAACATCATTAGGGGCTGGATCTTTGGAACT |
| | | ACCCTGGATTCTAAAACTCAATCTTTATTGATTGTGAATAACGCTACCAACGTTGTGATTAAAGTTTGTGAATTTCAATT |
| | | TTGTAACGATCCTTTTCTGGGAGTTTATTATCATAAAAACAATAAATCTTGGATGGAATCTGAATTCCGCGTTTATTCTT |
| | | CTGCCAATAACTGTACCTTTGAGTACGTTTCTCAACCTTTCTTAATGGATTTAGAAGGAAAACAAGGCAATTTCAAAAAC |
| | | TTAAGAGAATTTGTTTTTAAAAATATTGACGGATATTTTAAAATTTATTCTAAGCATACTCCTATTAATTTAGTGAGAGAC |
| | | TTACCCCAAGGATTTTCTGCTTTAGAACCTTTAGTTGACTTACCTATTGGAATCAATATCACTAGATTTCAAACTTTATTA |
| | | GCTTTACATAGATCTTATTTAACTCCTGGAGATTCTTCCTCCGGCTGGACAGCCGGAGCCGCTGCTTATTACGTTGGA |
| | | TATTTACAGCCTAGAACTTTTCTGCTGAAATATAACGAAAACGGAACCATTACCGACGCCGTTGACTGTGCTCTGGATC |
| | | CTTTATCTGAAACCAAGTGTACTTTAAAATCTTTTACCGTTGAAAAAGGAATTTATCAAACTTCTAATTTTAGAGTTCAAC |
| | | CTACTGAATCTATCGTTAGATTCCCTAATATTACTAATTTGTGTCCCTTTGGAGAGGTTTTCAACGCTACTAGATTTGCC |
| | | TCTGTTTACGCTTGGAATCGCAAGAGAATTTCTAATTGTGTGGCCGATTACTCCGTTTTGTATAACTCTGCTTCTTTCTC |
| | | TACTTTTAAGTGTTACGGAGTTTCCCCTACTAAACTGAACGATTTGTGTTTTACTAACGTTTACGCTGATTCTTTTGTTAT |
| | | TAGAGGCGACGAAGTTAGACAAATTGCTCCTGGACAAACTGGAAAGATTGCTGACTATAACTATAAACTGCCTGACGA |
| | | TTTTACCGGCTGTGTTATTGCTTGGAATTCTAATAATTTAGATTCTAAAGTTGGAGGAAATTATAATTATTTATATAGATT |
| | | ATTTAGAAAATCTAATTTAAAACCTTTTGAAAGAGATATTTCCACTGAGATTTACCAGGCTGGATCTACTCCTTGTAACG |
| | | GCGTTGAGGGATTTAATTGTTATTTTCCTTTACAATCTTACGGATTTCAACCTACCAACGGAGTTGGATATCAACCTTAC |
| | | AGAGTTGTGGTGCTGTCTTTTGAATTATTACACGCTCCCGCTACTGTTTGCGGCCCTAAAAAGTCTACTAATCTGGTTA |
| | | AGAATAAGTGTGTGAATTTTAATTTCAACGGATTGACCGGAACTGGAGTTCTGACTGAATCTAATAAAAAATTTTTACCC |
| | | TTTCAACAATTTGGAAGGGATATCGCTGATACTACTGACGCTGTTAGAGATCCTCAAACTTTAGAAATCCTGGATATTA |
| | | CTCCTTGTTCTTTTGGAGGAGTTTCCGTTATTACTCCTGGCACTAATACTTCTAATCAAGTTGCTGTTTTATATCAAGAC |
| | | GTTAATTGCACCGAAGTTCCTGTTGCTATTCACGCTGATCAGTTAACTCCTACTTGGAGAGTTTATTCTACTGGATCTA |
| | | ACGTTTTTCAAACCAGAGCTGGCTGTTTAATCGGAGCTGAACACGTGAATAATTCTTACGAGTGCGATATTCCCATCG |
| | | GAGCTGGAATTTGTGCCTCTTATCAAACTCAAACCAATTCTCCTAGGAGGGCTAGATCCGTTGCCTCTCAATCTATTAT |
| | | TGCTTATACCATGTCTTTAGGAGCTGAAAATTCCGTTGCTTACTCTAACAATTCTATTGCTATTCCTACTAACTTTACTAT |
| | | TTCTGTTACTACTGAAATTCTGCCCGTGTCCATGACTAAAACTTCTGTTGATTGTACTATGTATATTTGTGGAGATTCCA |
| | | CTGAGTGTTCTAACCTGTTATTACAATACGGATCTTTTTGTACTCAATTAAATAGAGCTCTGACTGGAATTGCTGTTGAA |
| | | CAGGACAAAAATACTCAAGAAGTTTTTGCCCAAGTTAAACAGATTTATAAAACTCCTCCTATTAAAGATTTTGGAGGATT |
| | | TAATTTCTCTCAAATTTTACCTGACCCTTCTAAGCCTTCCAAAAGGTCTTTCATCGAAGATTTATTATTTAATAAAGTTAC |
| | | CTTAGCCGACGCTGGATTTATTAAGCAATACGGAGATTGCTTAGGCGATATCGCTGCTAGAGACTTAATTTGTGCTCA |
| | | AAAATTTAACGGATTAACTGTTTTACCTCCCCTGTTAACTGACGAAATGATCGCTCAATATACTTCTGCTCTGTTAGCTG |
| | | GAACTATTACTTCTGGCTGGACTTTTGGAGCTGGAGCTGCTTTACAAATTCCCTTTGCTATGCAGATGGCTTATAGATT |
| | | TAACGGAATTGGAGTTACTCAAAACGTTTTATACGAAAATCAAAAATTAATTGCTAATCAATTTAATTCTGCTATTGGAA |
| | | AAATTCAAGATTCCCTGTCTTCTACTGCTTCCGCTCTGGGAAAATTACAAGACGTTGTTAATCAAAACGCTCAAGCTTT |
| | | GAATACCTTAGTTAAACAATTATCTTCCAATTTTGGAGCTATTTCTTCTGTTTTAAACGACATTTTATCTAGATTAGATCC |
| | | CCCTGAAGCTGAAGTTCAGATTGACAGATTGATTACCGGAAGATTACAATCTTTACAAACTTACGTTACTCAACAACTG |
| | | ATTAGAGCTGCTGAAATTAGAGCCTCTGCTAATTTAGCTGCTACTAAGATGTCTGAGTGTGTTTTAGGACAGTCCAAAA |
| | | GAGTTGATTTTTGTGGAAAAGGCTATCATCTGATGTCTTTTCCTCAATCTGCTCCTCACGGAGTTGTGTTTTTACACGTT |
| | | ACTTACGTTCCTGCTCAAGAGAAGAATTTTACTACTGCTCCTGCTATTTGTCACGACGGAAAAGCTCATTTTCCTAGAG |
| | | AAGGAGTTTTTGTTTCTAACGGAACTCATTGGTTTGTTACTCAAAGAAACTTTTACGAACCTCAGATTATTACCACTGAT |
| | | AATACCTTTGTTTCTGGCAATTGTGACGTGGTTATTGGAATTGTTAATAATACTGTTTACGATCCTTTACAACCCGAACT |
| | | GGATTCTTTTAAAGAAGAATTAGATAAATACTTTAAAAATCATACTTCTCCCGACGTTGATTTAGGAGATATCTCTGGAA |
| | | TTAACGCTTCTGTTGTGAATATTCAAAAGGAAATTGATAGATTAAACGAAGTGGCTAAAAATTTAAACGAGTCTTTAATT |
| | | GATTTACAGGAACTGGGAAAATACGAACAATATATTAAGTGGCCTTGGTACATTTGGTTAGGCTTTATTGCTGGACTGA |
| | | TTGCTATTGTGATGGTTACTATCATGTTGTGTTGCATGACTTCTTGTTGTTCCTGTTTAAAAGGCTGTTGCTCTTGTGGA |
| | | TCTTGTTGCAAATTTGACGAAGACGATTCTGAACCTGTTCTGAAAGGAGTTAAACTGCATTATACTTAAATGAGACCAT |
| | | A |
| 261 | 2A1681 | ATAGGTCTCACACACTAGGGCGCGCCAGTCCTCAAGCTGGGCCTGACACAACTGTGTTCACTAGCAACTACTCCCAG |
| | | ACACCATGGTACTCCCGACTCCTGAGGTACTCCCTGCCGTTACTGCCCTGTGGGGCAAGGTGATACTCCCTGAAGTT |
| | | GGTGGTGAGGCCCTGGGCAGGCTACTCCCGGTCTACCCTTGGACCCAGAGGTCGACTCGGACCGGCCACCATGTTC |
| | | GTGTTCTTAGTGCTGTTACCCCTGGTTTCTTCTCAGTGTGTCAATTTAACCACCAGAACCCAACTGCCTCCTGCCTATA |
| | | CTAATTCCTTTACCCGCGGAGTTTACTATCCCGATAAGGTTTTTCGCTCCTCTGTTTTACACTCTACTCAGGACTTATTC |
| | | TTACCCTTCTTCTCCAACGTTACTTGGTTTCACGCCATTCACGTTTCTGGAACCAACGGAACTAAGAGATTCGATAATC |
| | | CTGTGTTACCTTTCAACGACGGAGTTTATTTTGCTTCCACTGAAAAATCCAATATCATTAGGGGCTGGATCTTTGGAAC |
| | | CACTTTAGATTCCAAGACTCAATCTTTATTAATTGTGAATAACGCCACCAACGTGGTTATCAAAGTGTGTGAATTCCAAT |
| | | TTTGTAACGACCCTTTCTTAGGCGTGTATTATCACAAAAATAATAAATCTTGGATGGAATCTGAATTTCGCGTTTACTCT |
| | | TCCGCTAACAACTGCACTTTTGAGTACGTTTCCCAGCCTTTTCTGATGGATCTGGAAGGCAAACAGGGAAATTTTAAAA |
| | | ATCTGAGAGAATTTGTTTTTAAGAACATTGACGGATATTTCAAGATCTATTCTAAACACACTCCCATCAATTTGGTTAGA |
| | | GATTTACCTCAGGGCTTTTCTGCTTTAGAACCTTTAGTTGACCTGCCTATTGGAATCAACATTACTAGATTTCAAACTCT |
| | | GTTAGCTCTGCATAGATCTTATTTAACTCCTGGAGATTCCTCCTCCGGCTGGACCGCCGGAGCTGCTGCTTATTACGT |
| | | TGGCTATTTACAACCCAGAACTTTTCTGTTAAAATATAACGAAAACGGCACCATCACTGACGCCGTGGATTGTGCTTTA |
| | | GATCCCTTATCCGAAACTAAGTGTACTCTGAAATCCTTCACTGTTGAAAAAGGAATTTATCAGACCTCTAATTTTAGAGT |
| | | GCAACCTACCGAATCTATTGTTAGATTTCCTAATATTACCAACTTGTGCCCTTTTGGCGAAGTTTTCAACGCTACTAGAT |
| | | TTGCTTCTGTTTACGCTTGGAATAGAAAAAGAATTTCTAACTGTGTGGCTGACTATTCCGTGTTATACAATTCTGCCTCT |
| | | TTTTCTACTTTTAAGTGTTACGGAGTGTCTCCCACTAAACTGAACGATTTGTGCTTTACCAACGTTTACGCTGATTCTTT |
| | | TGTTATTAGAGGCGACGAGGTTCGCCAGATTGCCCCTGGCCAGACTGGCAAAATTGCTGACTATAACTATAAATTACC |
| | | TGACGATTTTACCGGCTGCGTTATCGCTTGGAACTCTAATAATCTGGATTCTAAAGTTGGAGGAAACTACAATTATTTA |
| | | TATAGATTATTTAGAAAATCTAATTTAAAACCCTTCGAGAGGGATATCTCTACTGAAATCTACCAAGCTGGATCTACTCC |
| | | TTGCAACGGCGTTGAAGGATTTAATTGTTATTTTCCTTTACAATCTTACGGATTCCAACCTACTAACGGAGTTGGATATC |
| | | AGCCTTATAGAGTGGTGGTTTTATCTTTCGAATTATTACACGCTCCCGCTACTGTGTGTGGACCCAAAAAGTCTACTAA |
| | | TTTAGTTAAAAATAAGTGTGTTAATTTCAATTTTAACGGACTCACTGGCACTGGAGTGTTAACTGAATCTAATAAAAAGT |
| | | TCTTACCTTTCCAACAGTTCGGACGCGACATTGCCGACACCACTGACGCTGTGAGAGATCCTCAAACCTTAGAGATTC |
| | | TGGATATTACCCCTTGTTCCTTTGGAGGCGTTTCCGTTATCACTCCCGGAACTAACACTTCTAATCAGGTTGCCGTTTT |
| | | ATATCAGGACGTTAATTGCACTGAAGTTCCTGTTGCTATTCACGCTGATCAACTGACTCCTACTTGGAGAGTTTATTCC |
| | | ACTGGATCTAACGTTTTTCAGACTCGCGCCGGCTGTTTAATTGGAGCTGAACACGTGAACAACTCCTACGAGTGCGAT |
| | | ATTCCTATTGGCGCTGGCATCTGTGCTTCTTATCAAACTCAAACTAATTCTCCCAGGAGGGCTCGCTCTGTTGCTTCCC |
| | | AATCTATCATTGCTTATACTATGTCCTTAGGCGCTGAAAATTCTGTTGCTTATTCCAACAATTCTATTGCTATTCCCACC |
| | | AATTTTACTATTTCTGTGACTACTGAAATTTTACCTGTTTCCATGACTAAGACTTCTGTTGATTGTACTATGTATATCTGC |
| | | GGAGATTCTACTGAGTGTTCCAACCTCTTATTACAGTACGGATCTTTTTGCACTCAGTTAAATAGAGCTCTGACTGGAA |
| | | TCGCTGTTGAACAAGACAAAAACACCCAAGAAGTGTTTGCTCAGGTGAAGCAAATTTACAAGACACCTCCTATTAAGG |
| | | ATTTTGGAGGATTCAATTTTTCCCAGATTTTACCTGATCCTTCTAAACCTTCTAAACGCTCCTTTATTGAAGATTTACTGT |
| | | TCAATAAAGTGACTCTGGCTGACGCTGGCTTCATCAAGCAATACGGCGATTGTTTAGGAGACATCGCTGCTAGAGACT |
| | | TAATTTGTGCTCAAAAATTCAACGGACTGACTGTTCTGCCCCCTTTACTGACCGACGAGATGATCGCCCAATATACTTC |
| | | TGCCCTGTTAGCTGGCACCATTACTTCTGGCTGGACCTTTGGAGCTGGCGCTGCTTTACAAATTCCTTTCGCCATGCA |
| | | GATGGCTTATCGCTTTAACGGAATTGGCGTTACCCAAAACGTGTTATACGAGAATCAAAAATTAATCGCCAATCAATTT |
| | | AATTCTGCTATTGGCAAGATTCAAGATTCTTTATCTTCTACTGCTTCCGCCCTGGGCAAACTGCAGGACGTTGTTAACC |
| | | AGAACGCTCAAGCCCTGAACACTTTAGTGAAGCAACTGTCTTCTAACTTCGGCGCTATTTCTTCCGTTTTAAACGACAT |
| | | TCTGTCTCGCTTAGATCCCCCTGAGGCTGAGGTTCAAATTGATAGACTGATTACTGGAAGATTACAGTCCCTGCAAAC |
| | | TTACGTTACTCAACAGTTAATCAGAGCTGCTGAAATCCGCGCTTCCGCTAATTTAGCTGCTACTAAAATGTCTGAGTGT |
| | | GTGTTAGGCCAGTCTAAGAGAGTTGACTTTTGTGGCAAGGGCTATCATTTAATGTCTTTTCCTCAGTCCGCTCCTCAC |
| | | GGCGTTGTGTTCTTACACGTGACTTACGTTCCCGCCCAAGAGAAAAATTTTACCACTGCTCCTGCTATTTGTCACGAC |
| | | GGAAAAGCTCATTTTCCTAGAGAAGGAGTGTTTGTTTCTAACGGAACCCACTGGTTTGTGACTCAAAGAAACTTTTACG |
| | | AACCCCAAATTATTACTACTGACAATACTTTCGTTTCCGGCAACTGTGACGTGGTGATCGGAATTGTTAATAACACCGT |
| | | TTACGATCCCTTACAACCTGAATTAGATTCTTTTAAAGAAGAATTAGATAAATATTTCAAAAATCATACTTCCCCTGACG |
| | | TTGATCTGGGAGATATTTCTGGAATTAACGCTTCTGTGGTGAACATTCAAAAAGAGATTGACAGATTAAACGAAGTTGC |
| | | TAAAAACCTGAACGAGTCCCTGATCGACCTGCAGGAACTGGGAAAATACGAGCAGTATATTAAGTGGCCTTGGTATAT |
| | | TTGGTTAGGATTTATTGCTGGATTAATTGCTATTGTGATGGTGACCATTATGTTGTGCTGTATGACCTCTTGTTGTTCTT |
| | | GCCTGAAGGGCTGCTGTTCTTGTGGCTCTTGTTGCAAGTTTGACGAAGACGATTCCGAACCCGTTTTAAAGGGAGTGA |
| | | AACTGCATTATACTTAAATGAGACCATA |
| 262 | 2A2681 | ATAGGTCTCACACACTAGGGCGCGCCAGTCCTCAAGCTGGGCCTGACACAACTGTGTTCACTAGCAACTACTCCCAG |
| | | ACACCATGGTACTCCCGACTCCTGAGGTACTCCCTGCCGTTACTGCCCTGTGGGGCAAGGTGATACTCCCTGAAGTT |
| | | GGTGGTGAGGCCCTGGGCAGGCTACTCCCGGTCTACCCTTGGACCCAGAGGTCGACTCGGACCGGCCACCATGTTT |
| | | GTTTTTCTGGTTTTATTACCCTTAGTGTCCTCCCAGTGCGTGAACTTAACTACCCGCACTCAGCTGCCTCCTGCCTATA |
| | | CCAACTCTTTCACTAGAGGCGTTTACTATCCTGACAAAGTTTTTAGATCTTCTGTGCTGCATTCCACTCAAGATTTATTC |
| | | CTGCCCTTCTTTTCTAACGTTACTTGGTTTCACGCCATCCACGTGTCTGGCACCAACGGAACCAAACGCTTTGACAAC |
| | | CCTGTGTTACCTTTTAACGACGGAGTTTACTTCGCCTCCACTGAAAAGTCCAATATTATCCGGGGCTGGATTTTCGGAA |
| | | CCACCTTAGATTCTAAAACCCAGTCTCTGCTGATTGTGAACAACGCCACTAACGTGGTTATTAAAGTGTGCGAGTTTCA |
| | | ATTTTGCAACGACCCTTTTCTGGGAGTTTATTACCACAAAAATAACAAATCTTGGATGGAGTCTGAATTTAGAGTGTATT |
| | | CTTCCGCCAATAATTGCACCTTCGAGTACGTTTCCCAACCCTTTCTGATGGACTTAGAAGGAAAGCAAGGCAATTTCAA |
| | | AAACCTGCGCGAATTTGTGTTCAAAAATATTGACGGCTATTTCAAAATTTACTCCAAGCATACCCCTATTAATTTAGTGC |
| | | GCGATCTGCCTCAGGGCTTCTCTGCCTTAGAGCCTTTAGTGGACCTGCCTATTGGCATTAATATTACTCGCTTTCAGA |
| | | CTTTACTGGCCCTGCATAGATCTTATTTAACTCCTGGAGACTCTTCTTCCGGCTGGACCGCTGGAGCCGCTGCCTACT |
| | | ACGTTGGCTATCTGCAGCCTAGAACTTTTTTATTAAAGTACAACGAAAACGGAACCATCACTGACGCTGTTGATTGCGC |
| | | CCTGGATCCTTTATCTGAAACAAAGTGCACCCTGAAGTCCTTCACCGTTGAAAAGGGCATTTACCAAACATCCAATTTT |
| | | AGGGTTCAGCCTACTGAATCCATCGTGCGCTTTCCCAACATCACTAACTTGTGTCCCTTTGGCGAGGTGTTTAACGCC |
| | | ACTCGCTTTGCCTCTGTGTACGCCTGGAACAGAAAGAGAATTTCCAATTGCGTGGCTGATTATTCTGTGCTGTATAACT |
| | | CCGCTTCTTTCTCCACCTTTAAGTGTTACGGAGTGTCCCCTACTAAACTGAACGACTTGTGCTTCACCAACGTTTACGC |
| | | CGATTCTTTTGTGATTCGCGGCGACGAAGTTAGACAAATCGCCCCCGGACAGACCGGAAAGATCGCTGATTACAACT |
| | | ATAAGTTACCTGACGACTTCACCGGCTGCGTGATTGCTTGGAATTCTAATAACTTAGACTCTAAAGTTGGAGGCAACTA |
| | | CAATTACCTGTATAGATTATTCCGCAAATCTAACCTGAAACCTTTTGAGAGAGACATCTCCACCGAAATTTACCAAGCC |
| | | GGCTCTACCCCCTGCAACGGAGTTGAAGGATTTAATTGCTACTTTCCCCTGCAGTCCTACGGATTCCAACCTACTAAC |
| | | GGCGTTGGATACCAACCTTACAGAGTTGTGGTGCTGTCTTTTGAATTATTACACGCCCCTGCCACCGTTTGTGGCCCT |
| | | AAGAAATCTACCAATCTGGTTAAAAACAAGTGTGTGAATTTTAATTTTAACGGCCTGACCGGCACTGGCGTTTTAACCG |
| | | AGTCTAACAAGAAGTTTCTGCCTTTCCAACAATTTGGCAGAGACATCGCCGACACCACCGACGCTGTGCGCGATCCTC |
| | | AAACCTTAGAAATTTTAGATATTACTCCTTGCTCTTTCGGCGGCGTTTCCGTTATTACTCCTGGAACCAATACCTCTAAT |
| | | CAAGTGGCTGTGCTGTACCAGGACGTTAATTGCACTGAAGTGCCTGTGGCTATTCACGCCGATCAACTGACCCCCAC |
| | | TTGGAGAGTTTATTCTACTGGATCTAACGTGTTCCAAACTAGAGCTGGCTGTCTGATCGGCGCCGAGCACGTTAATAA |
| | | TTCTTACGAGTGTGATATCCCTATTGGCGCTGGCATTTGCGCCTCTTACCAGACCCAGACCAACTCCCCCCGCAGAG |
| | | CTAGATCCGTGGCCTCTCAGTCCATTATTGCCTATACTATGTCCTTAGGAGCCGAAAATTCTGTGGCTTACTCCAACAA |
| | | TTCTATTGCCATTCCCACTAATTTTACTATCTCTGTGACTACCGAAATCCTGCCCGTGTCCATGACTAAGACCTCCGTG |
| | | GACTGCACCATGTATATCTGCGGAGACTCTACTGAGTGTTCCAACTTATTACTGCAGTACGGCTCTTTCTGTACTCAGC |
| | | TGAATAGAGCCCTGACTGGAATTGCTGTGGAGCAAGACAAAAATACCCAGGAGGTGTTCGCTCAGGTGAAACAAATTT |
| | | ATAAGACCCCTCCCATCAAAGATTTTGGAGGCTTCAATTTTTCTCAAATTCTGCCCGACCCCTCCAAGCCTTCCAAAAG |
| | | ATCCTTTATTGAAGATCTGCTGTTCAATAAGGTTACTTTAGCCGACGCCGGCTTCATTAAGCAGTACGGAGATTGTCTG |
| | | GGCGATATTGCTGCCCGCGACCTGATTTGCGCTCAGAAGTTCAACGGATTAACCGTTCTGCCTCCTCTGCTGACTGA |
| | | CGAGATGATTGCTCAGTATACTTCTGCCCTGCTGGCTGGAACTATTACCTCTGGCTGGACCTTCGGCGCCGGAGCTG |
| | | CTCTGCAAATTCCCTTCGCCATGCAAATGGCTTACAGATTTAACGGCATCGGAGTTACTCAAAACGTGCTGTACGAAA |
| | | ACCAAAAATTAATTGCCAACCAGTTCAATTCCGCTATCGGCAAAATTCAGGATTCTCTGTCTTCTACTGCTTCCGCTTTA |
| | | GGCAAACTGCAAGACGTTGTTAACCAGAACGCCCAAGCTTTAAACACCCTGGTTAAGCAGCTGTCCTCTAATTTTGGC |
| | | GCTATCTCTTCTGTTCTGAACGACATTTTATCTAGACTGGACCCCCCTGAAGCCGAGGTGCAGATTGATAGATTAATCA |
| | | CCGGAAGACTGCAATCCCTGCAGACCTACGTTACCCAGCAATTAATCAGAGCCGCCGAGATCAGAGCCTCTGCCAAC |
| | | TTAGCTGCCACCAAAATGTCCGAGTGTGTGCTGGGACAGTCCAAGCGCGTGGACTTCTGTGGAAAGGGATACCACCT |
| | | GATGTCTTTTCCTCAATCTGCTCCCCACGGAGTTGTGTTTCTGCACGTTACTTACGTGCCTGCCCAAGAGAAAAACTTT |
| | | ACTACCGCCCCCGCTATTTGCCACGACGGCAAGGCTCACTTCCCTAGAGAAGGAGTTTTTGTGTCTAACGGAACCCA |
| | | TTGGTTTGTGACTCAAAGAAATTTTTACGAGCCTCAAATCATTACCACCGATAACACTTTTGTTTCCGGCAATTGTGAC |
| | | GTGGTGATTGGAATCGTTAACAACACCGTTTACGACCCTTTACAGCCCGAATTAGACTCTTTTAAAGAGGAGTTAGATA |
| | | AATATTTTAAAAACCATACCTCTCCCGACGTGGACCTGGGAGATATTTCCGGAATTAACGCTTCTGTTGTGAATATCCA |
| | | GAAAGAGATCGACAGATTAAACGAGGTTGCTAAAAATTTAAACGAATCCCTGATTGACCTGCAGGAGCTGGGCAAATA |
| | | CGAACAATATATTAAGTGGCCTTGGTATATTTGGTTAGGCTTCATCGCTGGATTAATCGCTATTGTTATGGTGACTATTA |
| | | TGTTGTGTTGTATGACTTCCTGCTGTTCTTGCTTAAAAGGCTGCTGTTCCTGCGGATCCTGTTGTAAATTCGACGAGGA |
| | | CGATTCCGAGCCTGTTTTAAAAGGAGTGAAATTACATTATACTTAAATGAGACCATA |
| 263 | 2A3681 | ATAGGTCTCACACACTAGGGCGCGCCAGTCCTCAAGCTGGGCCTGACACAACTGTGTTCACTAGCAACTACTCCCAG |
| | | ACACCATGGTACTCCCGACTCCTGAGGTACTCCCTGCCGTTACTGCCCTGTGGGGCAAGGTGATACTCCCTGAAGTT |
| | | GGTGGTGAGGCCCTGGGCAGGCTACTCCCGGTCTACCCTTGGACCCAGAGGTCGACTCGGACCGGCCACCATGTTC |
| | | GTGTTCCTGGTGCTGCTGCCCTTAGTGTCCTCCCAGTGTGTGAACCTGACCACCAGAACCCAGTTACCTCCCGCTTA |
| | | CACCAACTCCTTTACCCGCGGAGTGTACTACCCTGATAAGGTTTTTAGATCCTCCGTTCTGCATTCTACCCAAGACCT |
| | | GTTTTTACCCTTCTTTTCCAACGTGACCTGGTTCCACGCTATCCACGTGTCCGGCACTAACGGCACTAAGCGCTTCGA |
| | | CAATCCTGTGCTCCCTTTTAACGACGGCGTGTACTTCGCTTCTACCGAAAAATCCAACATCATCCGCGGCTGGATCTT |
| | | CGGAACTACCCTGGATTCTAAAACCCAGTCTTTATTAATCGTGAATAACGCCACCAACGTGGTTATTAAGGTCTGTGAG |
| | | TTCCAATTTTGCAACGACCCTTTCTTAGGCGTTTATTACCACAAAAACAATAAGTCTTGGATGGAGTCCGAATTCCGCG |
| | | TGTACTCCTCTGCCAACAATTGCACCTTTGAGTACGTGTCCCAGCCCTTCCTGATGGACCTGGAAGGCAAGCAGGGC |
| | | AATTTTAAAAATCTGCGCGAATTCGTTTTCAAGAACATCGACGGCTACTTTAAGATTTATTCCAAACATACCCCCATCAA |
| | | CCTGGTGCGCGATTTACCCCAGGGCTTCTCCGCCTTAGAGCCCTTAGTGGATCTGCCTATCGGCATCAATATCACCC |
| | | GCTTTCAGACTCTGCTGGCCCTGCACAGATCCTACCTGACTCCCGGAGACTCTTCTTCTGGCTGGACCGCCGGAGCT |
| | | GCCGCCTACTACGTGGGCTACCTGCAACCCCGCACCTTTCTGCTGAAGTACAACGAAAACGGCACCATCACAGACGC |
| | | CGTTGACTGCGCTCTGGACCCCCTGTCTGAGACTAAGTGCACCCTGAAGTCCTTCACTGTGGAGAAAGGAATCTACC |
| | | AGACCTCCAACTTCCGCGTGCAGCCTACCGAATCCATTGTTCGCTTCCCTAACATTACTAATCTGTGCCCCTTCGGAG |
| | | AAGTTTTCAACGCCACTAGATTCGCTTCCGTGTACGCCTGGAATCGCAAGCGCATCTCCAATTGCGTTGCTGACTACT |
| | | CTGTGTTATACAATTCCGCCTCTTTTTCCACTTTCAAGTGCTACGGCGTGTCTCCTACCAAGCTGAACGACCTGTGTTT |
| | | CACTAACGTGTACGCTGATTCCTTTGTTATCCGCGGCGACGAGGTGAGACAGATCGCCCCTGGCCAGACCGGAAAAA |
| | | TCGCCGACTACAACTACAAGTTACCCGACGATTTTACCGGCTGTGTTATTGCTTGGAACTCTAATAATCTGGACTCTAA |
| | | AGTGGGCGGCAATTACAACTACTTATATCGCCTGTTCAGAAAATCCAACCTGAAACCCTTCGAACGGGACATTTCCAC |
| | | CGAAATTTATCAGGCCGGCTCCACCCCCTGCAACGGAGTGGAGGGCTTCAATTGCTACTTCCCCCTGCAATCCTACG |
| | | GCTTTCAGCCCACCAACGGCGTGGGATACCAGCCCTACCGCGTTGTTGTGTTATCCTTTGAACTGCTGCACGCTCCT |
| | | GCTACTGTGTGCGGACCTAAAAAATCCACCAATCTGGTGAAGAACAAGTGTGTGAATTTTAATTTTAACGGCCTGACC |
| | | GGCACCGGAGTGCTGACCGAGTCCAACAAAAAGTTTCTGCCCTTTCAGCAGTTCGGCCGGGACATTGCCGACACTAC |
| | | CGACGCTGTGAGGGATCCTCAGACCCTGGAGATTCTGGACATTACCCCTTGCTCCTTCGGAGGAGTTTCCGTGATCA |
| | | CCCCTGGCACCAATACTTCTAACCAAGTGGCTGTTTTATACCAGGACGTGAATTGTACTGAGGTGCCTGTGGCCATCC |
| | | ACGCCGATCAATTAACTCCCACCTGGAGAGTGTATTCCACCGGCTCTAACGTTTTCCAAACCCGCGCTGGCTGCTTAA |
| | | TCGGCGCTGAGCACGTGAACAACTCCTACGAGTGTGATATTCCTATCGGAGCCGGCATCTGTGCTTCCTACCAGACT |
| | | CAGACCAACTCCCCCAGACGCGCTAGGTCCGTGGCTTCCCAGTCTATTATCGCTTATACTATGTCCCTGGGAGCCGA |
| | | GAATTCTGTTGCCTATTCCAATAACTCCATCGCCATTCCTACCAACTTTACCATCTCTGTGACCACCGAGATTCTGCCC |
| | | GTGTCCATGACCAAAACTTCTGTGGATTGTACCATGTACATCTGTGGAGATTCCACCGAGTGCTCTAACCTGCTGCTG |
| | | CAGTACGGCTCCTTTTGCACCCAATTAAACCGCGCTCTGACTGGCATCGCCGTGGAGCAAGATAAAAACACCCAAGA |
| | | GGTGTTCGCTCAGGTGAAGCAGATCTACAAGACACCTCCCATTAAAGATTTCGGAGGCTTTAATTTCTCTCAGATCCT |
| | | GCCCGACCCTTCTAAGCCCTCTAAACGCTCCTTCATCGAGGATCTGCTGTTCAACAAGGTTACCCTGGCCGACGCTG |
| | | GCTTTATCAAACAGTACGGCGACTGCTTAGGCGACATCGCCGCCCGCGATTTAATTTGCGCTCAGAAGTTCAACGGA |
| | | CTGACCGTGCTGCCTCCTCTGCTGACCGACGAAATGATCGCCCAATACACCTCCGCCCTGCTGGCTGGCACTATCAC |
| | | CTCCGGCTGGACCTTTGGCGCTGGAGCCGCTCTGCAAATCCCTTTCGCTATGCAGATGGCTTACCGCTTTAACGGAA |
| | | TCGGCGTGACCCAGAACGTGTTATACGAAAATCAGAAATTAATTGCCAATCAATTTAACTCTGCCATCGGCAAGATTCA |
| | | GGATTCTCTGTCTTCTACTGCCTCTGCCTTAGGAAAACTGCAGGACGTGGTGAATCAGAACGCCCAGGCCCTGAATA |
| | | CCCTGGTTAAGCAACTGTCTTCCAATTTCGGCGCTATCTCCTCTGTGTTAAACGACATTCTGTCCCGCCTGGATCCTC |
| | | CTGAGGCCGAAGTGCAAATTGACCGCTTAATCACTGGCAGACTGCAATCCCTGCAAACCTACGTTACTCAACAGCTGA |
| | | TCAGAGCCGCCGAAATCCGCGCTTCTGCCAACTTAGCTGCTACCAAGATGTCCGAGTGCGTGCTGGGACAGTCCAAA |
| | | AGAGTTGACTTTTGCGGAAAGGGCTACCACCTGATGTCCTTTCCCCAGTCCGCCCCCCACGGAGTTGTTTTCCTGCA |
| | | CGTTACTTACGTTCCTGCTCAAGAGAAGAACTTCACCACCGCTCCCGCTATTTGCCACGACGGCAAGGCTCATTTCCC |
| | | CAGAGAGGGAGTGTTTGTGTCCAACGGCACTCACTGGTTTGTTACTCAGCGCAACTTCTACGAACCTCAGATCATCAC |
| | | CACTGACAATACCTTTGTGTCCGGAAACTGTGACGTGGTTATCGGCATTGTGAACAATACTGTGTACGACCCTTTACA |
| | | ACCTGAGCTGGATTCTTTTAAAGAAGAACTGGACAAGTACTTCAAGAACCACACCTCCCCCGACGTGGATCTGGGCG |
| | | ACATCTCCGGCATCAACGCCTCTGTGGTGAATATTCAGAAGGAGATTGATCGCCTGAACGAGGTTGCCAAGAATCTGA |
| | | ACGAGTCTCTGATCGACCTGCAGGAGCTGGGCAAGTACGAACAGTACATCAAGTGGCCCTGGTACATTTGGCTGGGC |
| | | TTTATTGCTGGACTGATCGCTATCGTTATGGTTACCATCATGCTGTGCTGTATGACCTCTTGCTGCTCCTGTCTGAAAG |
| | | GCTGTTGCTCCTGCGGCTCCTGTTGTAAGTTTGACGAGGACGACTCCGAGCCTGTTCTGAAAGGAGTTAAACTGCAC |
| | | TACACCTAAATGAGACCATA |
| 264 | 2A4681 | ATAGGTCTCACACACTAGGGCGCGCCAGTCCTCAAGCTGGGCCTGACACAACTGTGTTCACTAGCAACTACTCCCAG |
| | | ACACCATGGTACTCCCGACTCCTGAGGTACTCCCTGCCGTTACTGCCCTGTGGGGCAAGGTGATACTCCCTGAAGTT |
| | | GGTGGTGAGGCCCTGGGCAGGCTACTCCCGGTCTACCCTTGGACCCAGAGGTCGACTCGGACCGGCCACCATGTTT |
| | | GTGTTTCTGGTGCTGCTGCCTCTGGTGTCCTCTCAGTGTGTTAACCTGACCACCAGAACCCAACTGCCCCCCGCCTA |
| | | CACTAACTCTTTCACTCGCGGCGTGTACTACCCCGATAAAGTTTTCAGATCCTCCGTGCTCCATTCTACCCAAGACCT |
| | | GTTCTTACCCTTTTTCTCCAACGTGACCTGGTTCCACGCCATCCACGTGTCCGGCACTAACGGAACCAAGCGCTTCGA |
| | | TAATCCCGTGCTGCCTTTCAACGACGGAGTTTACTTTGCTTCCACCGAGAAGTCCAATATTATCCGGGGCTGGATCTT |
| | | CGGCACCACACTGGATTCCAAAACCCAGTCCTTACTGATTGTGAACAACGCCACTAACGTGGTGATCAAGGTGTGTGA |
| | | GTTCCAGTTCTGTAACGACCCCTTTCTGGGCGTGTATTATCATAAAAACAACAAGTCCTGGATGGAGTCCGAGTTTAG |
| | | AGTGTATTCTTCCGCTAACAACTGCACCTTCGAATACGTGTCCCAGCCTTTCCTGATGGATCTGGAAGGAAAGCAGGG |
| | | CAACTTCAAGAACTTACGCGAGTTCGTGTTCAAGAACATCGACGGCTACTTCAAAATTTACTCCAAGCACACCCCTATC |
| | | AACTTAGTGAGAGATCTGCCCCAGGGCTTCTCCGCTCTGGAACCTCTGGTGGACTTACCCATTGGCATCAACATCACT |
| | | CGCTTCCAAACACTGCTCGCTCTGCACCGCTCTTATCTGACCCCCGGCGACTCCTCTTCTGGCTGGACCGCCGGCGC |
| | | CGCTGCCTATTACGTGGGATACCTGCAACCCCGCACCTTTCTGCTGAAATACAACGAAAACGGCACCATCACAGACG |
| | | CTGTGGACTGCGCTCTGGACCCCCTGTCCGAGACTAAGTGCACCCTGAAGTCCTTCACCGTTGAAAAGGGCATTTAT |
| | | CAGACTTCCAACTTCCGCGTGCAGCCTACTGAGTCCATTGTGCGCTTCCCTAACATCACTAACTTGTGTCCTTTCGGC |
| | | GAAGTGTTCAACGCTACTCGCTTCGCCTCCGTGTACGCCTGGAACCGCAAGAGAATCTCCAATTGCGTGGCCGACTA |
| | | CTCTGTTCTCTACAACTCTGCCTCCTTCTCCACCTTTAAGTGCTACGGCGTGTCCCCCACCAAACTGAACGACCTGTG |
| | | CTTCACCAACGTGTACGCCGACTCCTTTGTGATCAGAGGCGACGAGGTGCGCCAGATCGCCCCCGGCCAGACTGGC |
| | | AAGATCGCCGATTACAATTACAAGCTGCCTGACGACTTTACCGGCTGCGTGATTGCCTGGAACTCCAACAACCTGGAC |
| | | TCCAAAGTGGGCGGCAACTACAACTACCTGTACCGCCTGTTTAGAAAATCCAACCTGAAGCCCTTCGAGCGGGACAT |
| | | TTCTACTGAGATCTACCAGGCCGGCTCCACCCCCTGTAACGGCGTGGAAGGCTTCAACTGCTACTTTCCCCTGCAGT |
| | | CCTACGGCTTCCAGCCTACCAACGGCGTGGGCTACCAGCCCTACCGCGTGGTGGTGTTATCCTTCGAGCTGCTGCA |
| | | CGCCCCTGCCACCGTGTGCGGACCCAAAAAGTCTACTAACCTGGTTAAGAATAAGTGTGTTAATTTCAATTTTAACGG |
| | | CTTAACCGGAACCGGAGTGCTGACCGAGTCCAATAAAAAGTTCCTGCCCTTTCAGCAGTTTGGCCGCGACATCGCCG |
| | | ATACTACCGACGCCGTGCGCGATCCCCAGACCCTGGAGATCCTGGACATTACCCCCTGCTCTTTCGGCGGAGTGTCC |
| | | GTGATCACCCCCGGCACCAATACCTCCAATCAGGTGGCCGTTCTGTACCAGGACGTGAATTGCACCGAAGTGCCCGT |
| | | GGCCATTCACGCCGACCAGTTAACTCCTACTTGGAGAGTGTACTCCACCGGCTCTAACGTGTTTCAGACCCGCGCCG |
| | | GCTGTCTGATCGGCGCCGAGCACGTGAACAACTCCTACGAGTGCGACATTCCCATTGGCGCCGGCATCTGCGCCTC |
| | | CTACCAAACCCAGACTAACTCTCCCAGACGCGCCCGCTCTGTGGCCTCTCAGTCCATCATCGCTTACACTATGTCCCT |
| | | GGGCGCCGAGAACTCCGTGGCCTATTCCAACAACTCCATCGCCATCCCCACTAACTTCACCATCTCTGTGACCACCG |
| | | AAATCCTCCCCGTGTCTATGACTAAGACTTCCGTGGACTGTACCATGTACATTTGCGGCGACTCCACCGAGTGTTCCA |
| | | ATCTGCTGCTGCAGTACGGCTCCTTTTGCACCCAGCTGAACCGCGCCCTGACCGGCATCGCTGTTGAGCAGGACAAG |
| | | AATACCCAGGAGGTGTTTGCTCAGGTGAAGCAAATCTATAAGACCCCTCCCATCAAGGACTTTGGCGGCTTCAACTTT |
| | | TCCCAGATCCTGCCCGACCCTTCCAAGCCCTCCAAACGCTCTTTCATCGAAGATCTGCTGTTCAATAAAGTGACCCTG |
| | | GCCGACGCCGGCTTCATCAAGCAGTACGGAGACTGTCTGGGAGACATTGCTGCTCGCGACCTGATTTGCGCCCAGA |
| | | AGTTCAACGGCCTGACCGTGCTGCCCCCTCTGCTGACCGACGAGATGATCGCTCAGTACACCTCCGCCCTGCTGGCT |
| | | GGCACTATCACCTCCGGCTGGACTTTCGGCGCTGGCGCCGCCCTGCAGATTCCCTTCGCCATGCAGATGGCTTATCG |
| | | CTTCAACGGAATCGGAGTGACACAGAACGTGCTGTACGAGAATCAGAAACTGATCGCTAACCAGTTTAATTCCGCCAT |
| | | TGGCAAGATCCAGGACTCCCTGTCCTCTACTGCTTCCGCCCTGGGCAAGCTGCAGGACGTGGTGAACCAGAACGCC |
| | | CAGGCTCTGAACACCCTGGTGAAGCAACTGTCTTCTAACTTTGGAGCCATTTCTTCCGTGCTGAACGACATCCTGTCC |
| | | AGACTGGATCCTCCTGAGGCCGAGGTGCAGATCGACCGCCTGATCACTGGCCGCCTGCAGTCCCTGCAGACTTACG |
| | | TTACCCAGCAATTAATCCGCGCTGCCGAGATCCGCGCCTCCGCCAACCTGGCCGCCACCAAGATGTCCGAGTGCGTT |
| | | CTGGGCCAGTCCAAACGCGTTGACTTCTGCGGCAAGGGCTACCACCTGATGTCCTTCCCCCAGTCCGCTCCCCACG |
| | | GAGTGGTGTTCCTGCACGTGACCTACGTGCCTGCCCAGGAGAAGAACTTCACCACCGCCCCCGCCATTTGCCACGA |
| | | CGGAAAGGCCCACTTCCCCCGCGAGGGAGTGTTCGTTTCTAACGGCACTCACTGGTTCGTGACCCAGAGAAACTTCT |
| | | ACGAGCCCCAGATTATTACCACCGACAATACCTTCGTTTCTGGCAACTGCGACGTGGTTATCGGCATCGTGAACAACA |
| | | CCGTGTACGACCCCCTGCAACCCGAGCTGGATTCTTTCAAGGAGGAGCTGGATAAGTACTTTAAAAACCATACCTCCC |
| | | CCGACGTGGACCTGGGCGACATCTCTGGCATCAACGCCTCCGTGGTGAATATCCAGAAGGAGATCGATCGCCTGAA |
| | | CGAGGTGGCCAAGAACTTAAACGAATCTCTGATCGACCTGCAGGAGCTGGGCAAGTACGAGCAGTATATTAAGTGGC |
| | | CCTGGTATATCTGGTTAGGCTTTATCGCCGGCCTGATCGCCATTGTTATGGTGACCATCATGCTGTGCTGCATGACCT |
| | | CCTGCTGTTCCTGTTTAAAAGGCTGCTGCTCCTGCGGATCCTGCTGTAAATTCGACGAAGACGACTCCGAGCCCGTG |
| | | CTGAAAGGAGTTAAGTTACACTATACCTAAATGAGACCATA |
| 265 | 2A5681 | ATAGGTCTCACACACTAGGGCGCGCCAGTCCTCAAGCTGGGCCTGACACAACTGTGTTCACTAGCAACTACTCCCAG |
| | | ACACCATGGTACTCCCGACTCCTGAGGTACTCCCTGCCGTTACTGCCCTGTGGGGCAAGGTGATACTCCCTGAAGTT |
| | | GGTGGTGAGGCCCTGGGCAGGCTACTCCCGGTCTACCCTTGGACCCAGAGGTCGACTCGGACCGGCCACCATGTTC |
| | | GTGTTCCTGGTGCTGCTGCCCCTGGTGTCCTCCCAGTGCGTCAACCTGACCACCCGGACCCAACTGCCCCCTGCCTA |
| | | TACCAATTCCTTCACCCGGGGCGTCTACTACCCCGACAAGGTGTTCCGGTCCTCTGTGCTCCACTCCACCCAGGACC |
| | | TCTTCCTCCCCTTTTTCTCCAACGTGACCTGGTTCCACGCCATCCACGTGTCTGGCACAAACGGAACCAAGCGCTTCG |
| | | ACAACCCTGTGCTCCCCTTCAACGACGGCGTGTACTTCGCCTCCACCGAGAAGTCCAACATCATCCGCGGCTGGATC |
| | | TTCGGCACCACCCTCGACTCTAAGACCCAGTCCCTGCTGATTGTGAATAACGCCACCAACGTGGTGATCAAGGTGTG |
| | | CGAATTTCAGTTCTGCAACGACCCCTTCCTGGGCGTTTACTACCATAAGAACAACAAGTCCTGGATGGAGTCCGAGTT |
| | | CCGGGTGTATTCCTCTGCCAATAACTGCACCTTTGAGTACGTGTCCCAGCCCTTCCTGATGGACCTGGAGGGCAAGC |
| | | AGGGCAATTTTAAAAACCTGCGCGAGTTCGTGTTCAAGAACATCGACGGCTACTTCAAGATCTATTCCAAGCACACCC |
| | | CTATCAACCTGGTGCGCGACCTGCCCCAGGGCTTTTCCGCTCTGGAGCCCCTGGTTGACCTGCCCATCGGCATCAAC |
| | | ATCACCCGCTTCCAGACTTTACTGGCCCTGCACCGCTCCTACCTGACCCCCGGCGATTCCTCTTCTGGCTGGACAGC |
| | | CGGAGCCGCTGCCTACTACGTGGGATACCTGCAGCCCCGCACCTTCCTGCTGAAGTACAACGAGAACGGAACCATTA |
| | | CAGACGCTGTCGACTGTGCTCTGGATCCCCTGTCCGAAACAAAGTGCACCCTGAAGTCCTTCACCGTGGAGAAGGGC |
| | | ATCTACCAGACCTCCAACTTCCGCGTGCAGCCCACCGAGTCCATCGTGAGATTCCCCAACATCACTAACCTGTGCCC |
| | | CTTCGGCGAGGTGTTCAACGCCACCCGCTTCGCCTCCGTGTACGCCTGGAACCGCAAGCGCATCTCCAACTGCGTT |
| | | GCCGACTACTCTGTGCTCTACAACTCCGCCTCCTTCTCCACCTTCAAGTGCTACGGCGTGTCCCCCACCAAGCTGAA |
| | | CGACCTGTGCTTCACCAACGTGTACGCCGACTCCTTCGTGATCCGCGGCGACGAGGTGCGCCAGATCGCCCCCGGC |
| | | CAGACCGGAAAGATCGCCGATTACAATTACAAGCTGCCCGACGACTTCACCGGCTGCGTGATCGCCTGGAACTCCAA |
| | | CAATCTGGACTCCAAGGTTGGCGGCAACTACAACTACCTGTACCGCCTGTTCCGCAAGTCCAACCTGAAGCCCTTCG |
| | | AGCGGGACATTTCCACAGAGATTTACCAGGCTGGCTCCACCCCCTGTAACGGAGTGGAGGGCTTCAACTGCTACTTC |
| | | CCCCTGCAGTCCTACGGCTTCCAGCCCACCAACGGCGTGGGCTACCAGCCCTACCGCGTGGTGGTGCTGTCCTTCG |
| | | AGCTGCTGCACGCCCCTGCCACCGTGTGCGGCCCCAAGAAGTCCACCAACCTGGTGAAGAACAAGTGCGTGAACTT |
| | | CAACTTCAACGGACTGACAGGCACCGGCGTGCTGACCGAGTCCAACAAGAAGTTCCTGCCCTTCCAGCAGTTCGGCC |
| | | GGGACATTGCCGACACCACCGACGCCGTGCGCGACCCCCAGACCCTGGAGATCCTGGACATCACCCCCTGCTCCTT |
| | | CGGCGGAGTGTCCGTGATCACCCCCGGCACCAACACCTCCAACCAGGTTGCCGTGCTGTACCAGGACGTTAACTGC |
| | | ACCGAGGTGCCCGTGGCCATCCACGCCGACCAGCTGACCCCCACCTGGCGCGTGTACTCCACCGGCTCCAACGTGT |
| | | TCCAGACCCGCGCCGGCTGCCTGATCGGCGCCGAGCACGTGAACAACTCCTACGAGTGCGACATCCCCATTGGCGC |
| | | CGGCATCTGCGCCTCCTACCAGACCCAGACCAACTCCCCTCGCCGCGCCCGGTCCGTCGCCTCCCAGTCCATCATC |
| | | GCCTACACCATGTCCCTGGGCGCCGAGAACTCCGTGGCCTACTCCAACAACTCCATTGCCATCCCCACCAACTTCAC |
| | | CATCTCCGTGACCACCGAAATCCTCCCCGTGTCCATGACCAAGACCTCCGTGGACTGCACCATGTACATCTGCGGCG |
| | | ACTCCACCGAGTGCTCCAACCTGCTGCTGCAGTACGGCTCCTTCTGCACCCAGCTGAATCGCGCCCTGACCGGCATC |
| | | GCCGTGGAGCAGGACAAGAACACCCAAGAGGTGTTCGCCCAGGTGAAGCAGATCTACAAGACACCTCCCATCAAGG |
| | | ACTTCGGCGGCTTCAACTTCTCCCAGATCCTGCCCGACCCCTCCAAGCCCTCCAAGCGCTCCTTCATCGAGGACCTG |
| | | CTGTTCAACAAGGTGACCCTGGCCGACGCCGGCTTCATCAAGCAGTACGGCGACTGTCTGGGAGACATTGCCGCCC |
| | | GCGACCTGATCTGCGCCCAGAAGTTCAACGGCTTAACCGTGCTGCCCCCTCTGCTGACCGACGAGATGATCGCCCA |
| | | GTACACATCCGCTCTGCTGGCCGGCACCATCACCTCCGGCTGGACCTTTGGCGCTGGCGCTGCCCTGCAGATCCCC |
| | | TTCGCTATGCAGATGGCCTACCGCTTCAACGGCATCGGCGTGACCCAGAACGTGCTGTACGAGAACCAGAAGCTGAT |
| | | CGCCAACCAGTTCAACTCCGCCATCGGCAAGATCCAGGACTCCCTGTCCTCCACCGCCTCCGCCCTGGGCAAGCTG |
| | | CAGGACGTGGTGAACCAGAACGCCCAGGCCCTGAACACCCTGGTGAAGCAGCTGTCCTCTAACTTCGGCGCCATCT |
| | | CCTCCGTGCTGAACGACATTCTGTCCCGCCTGGATCCTCCTGAGGCCGAGGTGCAAATCGATCGCCTCATCACCGGC |
| | | CGCCTGCAGTCCCTGCAGACCTACGTGACACAGCAGCTGATCCGCGCCGCCGAGATCCGCGCCTCCGCCAACCTGG |
| | | CCGCCACCAAGATGTCTGAGTGCGTGCTGGGCCAGTCCAAACGCGTTGACTTCTGCGGCAAGGGCTACCACCTGAT |
| | | GTCCTTCCCCCAGTCCGCCCCCCACGGCGTGGTGTTCCTGCACGTGACCTACGTGCCCGCCCAGGAGAAGAACTTC |
| | | ACTACCGCCCCCGCCATCTGCCACGACGGCAAGGCCCACTTCCCCCGCGAGGGCGTGTTCGTGTCCAACGGCACCC |
| | | ACTGGTTCGTGACCCAGCGCAACTTCTACGAGCCCCAGATCATCACCACCGACAACACCTTCGTGTCCGGCAACTGC |
| | | GACGTGGTGATTGGCATCGTGAACAACACCGTGTACGACCCCCTGCAGCCCGAGCTGGACTCCTTCAAGGAGGAGC |
| | | TGGACAAGTACTTTAAGAACCACACCTCCCCCGACGTGGACCTGGGCGACATCTCCGGCATCAACGCCTCCGTGGTG |
| | | AACATCCAGAAGGAGATCGACCGCCTGAACGAGGTGGCCAAGAACCTGAACGAGTCCCTGATCGACCTGCAGGAGC |
| | | TGGGCAAGTACGAACAGTACATCAAGTGGCCCTGGTACATCTGGCTGGGCTTCATCGCCGGCCTGATCGCCATCGTG |
| | | ATGGTGACCATCATGCTGTGCTGCATGACCTCTTGCTGTTCCTGTCTGAAGGGCTGCTGCTCCTGCGGCTCCTGCTG |
| | | CAAGTTCGACGAGGACGACTCCGAGCCCGTGCTGAAGGGCGTGAAGCTGCACTACACCTAAATGAGACCATA |
| 266 | 2A6681 | ATAGGTCTCACACACTAGGGCGCGCCAGTCCTCAAGCTGGGCCTGACACAACTGTGTTCACTAGCAACTACTCCCAG |
| | | ACACCATGGTACTCCCGACTCCTGAGGTACTCCCTGCCGTTACTGCCCTGTGGGGCAAGGTGATACTCCCTGAAGTT |
| | | GGTGGTGAGGCCCTGGGCAGGCTACTCCCGGTCTACCCTTGGACCCAGAGGTCGACTCGGACCGGCCACCATGTTC |
| | | GTGTTCCTGGTGCTGCTCCCCCTGGTGAGCTCCCAGTGCGTCAACCTGACCACACGGACCCAGCTGCCCCCCGCCT |
| | | ATACCAACAGCTTCACCCGCGGCGTCTACTACCCCGACAAGGTGTTCCGGAGCAGCGTGCTGCACAGCACCCAGGA |
| | | CCTCTTCCTCCCCTTTTTTAGCAACGTGACCTGGTTCCACGCCATCCACGTGAGTGGCACCAACGGCACCAAGCGGT |
| | | TCGACAACCCTGTGCTCCCCTTCAACGACGGCGTGTACTTCGCTAGCACAGAAAAAAGTAACATCATTCGGGGCTGG |
| | | ATCTTCGGCACCACACTGGATAGCAAAACCCAGAGCCTGCTGATTGTGAATAACGCCACCAACGTGGTGATCAAGGT |
| | | GTGCGAGTTCCAGTTCTGCAACGACCCCTTCCTGGGCGTGTACTACCACAAGAACAACAAGAGCTGGATGGAGAGCG |
| | | AGTTCCGCGTGTATAGCTCTGCCAACAACTGCACCTTCGAGTACGTGAGCCAGCCCTTCCTGATGGACCTGGAGGGC |
| | | AAGCAGGGCAATTTCAAAAACCTGCGGGAGTTCGTGTTCAAGAACATCGACGGCTACTTCAAGATCTACAGCAAGCAC |
| | | ACCCCCATCAACCTGGTGCGGGACCTGCCCCAGGGCTTTAGCGCTCTGGAGCCCCTGGTGGACCTGCCCATCGGCA |
| | | TCAACATCACCCGCTTCCAAACCCTGTTGGCCCTGCACCGGAGCTACCTGACCCCTGGCGATAGCAGTAGTGGCTGG |
| | | ACAGCCGGAGCCGCCGCCTACTACGTGGGATACCTGCAGCCCCGGACCTTCCTGCTGAAGTACAACGAGAACGGCA |
| | | CAATCACAGACGCCGTGGACTGCGCCCTGGACCCCCTGAGCGAAACAAAGTGCACCCTCAAAAGTTTCACCGTGGA |
| | | GAAGGGCATCTACCAGACCAGCAACTTCCGGGTGCAGCCCACCGAGAGCATCGTGCGGTTCCCCAACATCACCAAC |
| | | CTGTGCCCCTTCGGCGAGGTGTTCAACGCCACCCGGTTCGCCAGCGTGTACGCCTGGAACCGGAAGCGGATCAGCA |
| | | ACTGCGTGGCCGACTACAGCGTGCTGTATAACAGTGCCAGCTTCAGCACCTTCAAGTGCTACGGCGTGAGCCCCACC |
| | | AAGCTGAACGACCTGTGCTTCACCAACGTGTACGCCGACAGCTTCGTGATCCGGGGCGACGAGGTGCGGCAGATCG |
| | | CCCCCGGCCAGACCGGCAAGATCGCCGATTACAATTACAAGCTGCCCGACGATTTCACCGGCTGCGTGATCGCCTG |
| | | GAACAGCAACAACCTGGACAGCAAGGTGGGGGGCAACTACAACTACCTGTACCGGCTGTTCCGCAAAAGTAACCTGA |
| | | AGCCCTTCGAGCGGGACATCAGCACCGAGATCTACCAGGCCGGCAGTACCCCTTGCAACGGCGTCGAGGGCTTCAA |
| | | CTGCTACTTCCCCCTGCAGAGCTACGGCTTCCAGCCCACCAACGGCGTGGGCTACCAGCCCTACCGGGTGGTGGTT |
| | | CTGAGCTTCGAGCTGCTGCACGCCCCTGCCACCGTGTGCGGCCCCAAGAAAAGCACCAACCTGGTGAAGAACAAGT |
| | | GCGTGAATTTCAATTTTAACGGACTCACCGGAACCGGCGTGCTGACCGAGAGCAACAAGAAGTTCCTGCCCTTCCAG |
| | | CAATTCGGCCGGGATATTGCCGACACCACTGACGCCGTGCGGGACCCCCAGACCCTGGAGATCCTGGACATCACAC |
| | | CCTGTAGCTTCGGCGGGGTGAGCGTGATCACCCCCGGCACCAACACCAGCAACCAGGTGGCCGTGCTGTACCAGGA |
| | | CGTGAACTGCACCGAGGTGCCCGTGGCCATCCACGCCGACCAGCTGACCCCCACCTGGCGGGTGTACAGCACCGG |
| | | CAGCAACGTGTTCCAGACCCGGGCCGGCTGCCTGATCGGCGCCGAGCACGTGAATAACAGCTACGAGTGCGACATC |
| | | CCCATCGGAGCCGGAATCTGCGCCAGCTACCAGACCCAGACCAACAGCCCCCGGAGAGCCCGGAGCGTGGCCAGC |
| | | CAGAGCATTATTGCCTACACCATGAGCCTGGGCGCCGAGAACAGCGTGGCCTACAGCAACAATAGTATTGCCATCCC |
| | | CACCAACTTCACCATCAGCGTGACCACCGAAATCCTCCCCGTGAGCATGACCAAGACCAGCGTGGACTGCACCATGT |
| | | ACATCTGCGGCGACAGCACCGAGTGCAGCAACCTGCTCCTGCAGTACGGCAGCTTCTGCACCCAGCTGAACCGGGC |
| | | CCTGACCGGAATTGCCGTGGAGCAGGACAAGAACACCCAGGAGGTGTTCGCCCAGGTGAAGCAGATCTACAAGACA |
| | | CCTCCCATCAAGGACTTCGGCGGCTTCAACTTCAGCCAGATCCTGCCCGACCCCAGCAAGCCCAGCAAGCGGAGCT |
| | | TCATCGAGGACCTGTTGTTCAACAAGGTGACCCTGGCCGACGCCGGCTTCATCAAGCAGTACGGCGACTGTCTGGGA |
| | | GATATTGCCGCACGGGACCTGATCTGCGCCCAGAAGTTCAACGGCCTGACCGTGCTGCCCCCACTGCTGACCGACG |
| | | AGATGATCGCCCAGTACACAAGCGCTCTGCTCGCCGGCACCATCACCAGCGGCTGGACCTTCGGCGCCGGCGCTGC |
| | | CCTGCAGATCCCCTTCGCCATGCAGATGGCCTACCGGTTCAACGGCATCGGCGTGACCCAGAACGTGCTGTACGAG |
| | | AACCAGAAGCTGATCGCCAACCAGTTCAACAGCGCCATCGGCAAGATCCAGGACAGCCTGAGCTCCACCGCCAGCG |
| | | CCCTGGGCAAGCTGCAGGACGTGGTGAACCAGAACGCCCAGGCCCTGAACACCCTGGTGAAGCAGCTGAGCAGCAA |
| | | CTTCGGCGCCATCAGCTCTGTGCTGAACGACATCCTGAGCCGGCTGGATCCTCCTGAGGCCGAGGTGCAAATCGAT |
| | | CGGCTCATCACCGGCCGGCTGCAGAGCCTGCAGACCTACGTGACACAGCAGCTGATCCGGGCCGCCGAGATCCGG |
| | | GCCAGCGCCAACCTGGCCGCTACCAAGATGAGCGAGTGCGTGCTGGGCCAGAGCAAGCGGGTGGACTTCTGCGGC |
| | | AAGGGCTACCACCTGATGAGCTTCCCCCAGAGCGCCCCCCACGGCGTGGTGTTCCTGCACGTGACCTACGTGCCCG |
| | | CCCAGGAGAAGAACTTCACCACCGCCCCCGCCATCTGCCACGACGGCAAGGCCCACTTCCCCCGGGAGGGCGTGTT |
| | | CGTGAGCAACGGCACCCACTGGTTCGTGACCCAGCGGAACTTCTACGAGCCCCAGATCATAACCACAGACAACACCT |
| | | TCGTGAGCGGCAACTGCGACGTGGTCATCGGCATCGTGAACAACACCGTGTACGACCCCCTGCAGCCCGAGCTGGA |
| | | CAGCTTCAAGGAGGAACTGGACAAGTACTTCAAGAACCACACCAGCCCCGACGTGGACCTGGGCGACATCAGCGGC |
| | | ATCAACGCCAGCGTGGTGAACATCCAGAAGGAGATCGACCGGCTGAACGAGGTGGCCAAGAACCTGAACGAGAGCC |
| | | TGATCGACCTGCAGGAGCTGGGCAAGTACGAGCAGTACATCAAGTGGCCCTGGTACATCTGGCTGGGCTTTATTGCC |
| | | GGCCTGATCGCCATCGTGATGGTGACCATCATGCTGTGCTGTATGACAAGCTGTTGCAGTTGCCTGAAGGGCTGCTG |
| | | CAGCTGCGGCAGCTGCTGCAAGTTCGACGAGGACGACAGCGAGCCCGTGCTGAAGGGCGTGAAGCTGCACTACAC |
| | | CTAAATGAGACCATA |
| 267 | P51 | ATGTACCGGATGCAGTTGTTGTCCTGTATAGCTCTTTCCCTTGCATTGGTCACTAATTCTGTGAACCTCACCACTCGCA |
| | | CACAGCTACCTCCCGCGTACACTAATTCATTTACCAGGGGCGTCTATTATCCTGATAAGGTGTTCCGGAGTTCAGTGT |
| | | TGCATAGCACTCAAGACCTGTTCCTGCCCTTCTTCTCCAATGTCACTTGGTTTCATGCGATACATGTGTCTGGTACCAA |
| | | CGGAACGAAGAGATTTGATAACCCCGTACTGCCATTCAATGATGGCGTATACTTTGCTTCGACTGAAAAATCCAACAT |
| | | CATCAGGGGCTGGATTTTTGGTACAACGCTTGATTCCAAGACCCAGTCCCTCCTTATTGTGAACAATGCGACCAACGT |
| | | CGTGATAAAGGTCTGTGAGTTTCAGTTCTGCAATGACCCATTCCTTGGAGTGTATTATCACAAGAACAACAAATCGTGG |
| | | ATGGAGTCAGAGTTTAGGGTGTACAGCAGCGCTAACAACTGTACATTTGAGTATGTGAGTCAGCCGTTTCTGATGGAT |
| | | CTTGAGGGCAAACAGGGCAATTTTAAGAATCTCAGAGAATTTGTGTTCAAGAACATTGATGGTTACTTTAAGATCTATA |
| | | GCAAACATACGCCAATCAACTTGGTTCGTGATCTGCCACAGGGATTTAGCGCACTGGAACCTCTCGTTGACTTGCCCA |
| | | TAGGTATTAACATCACCAGGTTCCAGACGCTCTTGGCATTACACCGTAGTTATCTGACCCCCGGGGACTCCAGTTCCG |
| | | GATGGACTGCAGGAGCCGCTGCCTACTATGTGGGTTACCTCCAGCCCAGGACCTTTCTTTTGAAATATAACGAGAAC |
| | | GGCACAATCACTGATGCTGTGGACTGCGCATTGGATCCTTTGTCAGAGACTAAGTGCACTCTGAAGTCATTCACAGTC |
| | | GAGAAAGGCATTTACCAGACGTCTAACTTCAGGGTTCAGCCTACTGAGTCCATCGTGAGATTCCCAAACATCACAAAT |
| | | CTTTGTCCCTTCGGTGAGGTATTCAATGCGACACGATTTGCCTCAGTGTACGCGTGGAATCGGAAGAGGATCTCCAAT |
| | | TGCGTGGCCGACTACTCCGTCTTATACAACTCAGCTAGCTTTTCAACATTCAAGTGCTATGGCGTGAGCCCTACCAAG |
| | | CTCAATGACCTGTGCTTCACTAATGTGTATGCCGACTCTTTTGTCATTCGCGGCGACGAGGTCCGACAAATCGCACCG |
| | | GGCCAAACCGGTAAAATTGCCGACTACAACTACAAGCTGCCTGACGACTTCACCGGCTGCGTAATCGCCTGGAACAG |
| | | CAATAACCTGGATAGCAAAGTGGGCGGAAACTACAACTACCTGTACCGGCTCTTTAGAAAGTCCAACCTGAAACCATT |
| | | CGAGCGCGATATCTCGACCGAAATCTACCAGGCGGGCAGCACCCCCTGTAATGGTGTAGAAGGGTTCAATTGTTACT |
| | | TTCCACTCCAGAGTTATGGGTTCCAGCCGACCAATGGCGTCGGTTATCAACCATATCGCGTTGTGGTGTTGTCCTTTG |
| | | AGCTGCTACACGCCCCAGCTACAGTGTGCGGGCCAAAGAAAAGCACAAATCTTGTCAAGAACAAATGCGTTAACTTTA |
| | | ATTTTAATGGACTCACAGGTACAGGAGTCCTGACCGAATCTAATAAGAAGTTCCTGCCCTTTCAACAGTTCGGACGAG |
| | | ACATTGCCGACACCACCGATGCCGTTCGGGACCCACAGACCTTAGAAATTCTGGATATTACTCCATGTAGTTTTGGGG |
| | | GAGTGTCTGTCATCACCCCTGGCACTAATACATCTAACCAGGTTGCAGTCCTCTACCAGGATGTGAACTGTACCGAAG |
| | | TGCCGGTCGCTATTCACGCAGACCAGCTCACTCCTACCTGGCGGGTGTACTCCACAGGCTCTAACGTGTTTCAGACA |
| | | CGTGCAGGGTGCCTAATCGGCGCAGAGCATGTAAATAACTCCTATGAGTGTGATATCCCCATCGGAGCCGGGATCTG |
| | | CGCTTCCTACCAGACACAAACGAATAGTCCCGGATCTGCCTCAAGCGTGGCATCTCAATCCATTATAGCATATACGAT |
| | | GTCCCTTGGAGCTGAAAACAGCGTTGCGTATTCAAACAATAGTATCGCTATTCCAACCAATTTTACAATTAGCGTGACC |
| | | ACAGAAATACTCCCTGTGAGCATGACCAAGACCAGTGTAGACTGTACTATGTACATCTGCGGCGACAGTACTGAGTGT |
| | | AGCAATCTGCTGCTACAGTATGGGTCCTTCTGTACTCAGCTTAATCGGGCTCTCACCGGAATCGCTGTAGAGCAAGAT |
| | | AAAAACACACAAGAAGTGTTTGCTCAAGTGAAGCAGATCTATAAGACACCTCCCATCAAGGATTTCGGTGGGTTCAAC |
| | | TTTAGCCAGATTCTGCCCGATCCGTCTAAACCGTCCAAGCGAAGTTTCATCGAAGACCTGCTTTTCAATAAGGTCACG |
| | | CTGGCAGATGCTGGATTTATCAAACAGTACGGCGACTGTCTGGGCGATATCGCCGCAAGAGACTTGATATGCGCCCA |
| | | AAAGTTTAATGGGTTAACCGTCCTTCCACCGCTCCTGACAGACGAGATGATCGCCCAGTATACAAGTGCCTTATTAGC |
| | | TGGGACCATTACTAGTGGATGGACATTTGGCGCCGGGGCTGCTCTACAGATACCCTTCGCCATGCAGATGGCTTACC |
| | | GCTTCAACGGAATCGGAGTTACCCAGAACGTACTGTACGAAAATCAGAAACTCATAGCTAATCAATTTAACTCTGCCAT |
| | | CGGGAAGATTCAGGATTCCCTGTCGTCTACAGCGTCCGCCTTGGGGAAACTGCAAGATGTAGTGAACCAGAACGCCC |
| | | AGGCCTTAAATACTCTGGTCAAGCAGTTATCTTCAAATTTCGGAGCAATTAGCTCTGTGTTGAACGATATTCTTTCCAG |
| | | GCTGGACCCTCCAGAAGCCGAAGTGCAAATAGACCGGCTCATCACGGGGCGCTTGCAAAGCCTGCAAACCTATGTCA |
| | | CCCAGCAACTGATTCGAGCAGCCGAGATCCGGGCCAGTGCTAATCTGGCCGCCACAAAAATGAGCGAGTGCGTCCT |
| | | CGGGCAGAGCAAACGCGTAGACTTCTGCGGTAAAGGCTATCACCTGATGAGCTTCCCTCAGAGCGCACCCCACGGG |
| | | GTGGTCTTCCTCCACGTTACCTACGTCCCTGCGCAGGAGAAGAACTTCACTACGGCCCCTGCAATTTGCCACGATGG |
| | | CAAGGCCCACTTTCCCAGGGAGGGGGTCTTCGTTTCCAACGGGACTCATTGGTTCGTGACTCAGAGAAATTTTTATGA |
| | | ACCTCAGATCATTACCACTGATAATACATTCGTGTCTGGCAACTGTGATGTGGTTATTGGGATAGTTAATAATACGGTA |
| | | TACGACCCACTCCAGCCCGAGCTGGACTCCTTCAAAGAGGAGCTGGACAAGTACTTTAAAAATCACACCTCACCTGAT |
| | | GTGGACCTAGGTGACATATCTGGCATAAATGCTAGCGTGGTTAACATTCAGAAGGAAATCGACAGACTCAACGAGGT |
| | | GGCCAAAAATCTGAACGAGAGTCTGATCGACCTGCAGGAGTTGGGAAAATATGAACAGGGGTATATCCCTGAAGCCC |
| | | CCAGGGACGGCCAGGCTTACGTCAGAAAGGATGGAGAGTGGGTGCTCTTGAGCACCTTCCTGTAA |
| 268 | P53 | ATGGGAGTCAAAGTTCTGTTTGCCCTGATCTGCATCGCTGTGGCCGAGGCCAAGgttaatcttacaaccagaactcaattaccccctgc |
| | | atacactaattctttcacacgtggtgtttattaccctgacaaagttttcagatcctcagttttacattcaactcaggacttgttcttacctttcttttccaatgttacttggttccatgcta |
| | | tacatgtctctgggaccaatggtactaagaggtttgataaccctgtcctaccatttaatgatggtgtttattttgcttccactgagaagtctaacataataagaggctggatttttggtact |
| | | actttagattcgaagacccagtccctacttattgttaataacgctactaatgttgttattaaagtctgtgaatttcaattttgtaatgatccatttttgggtgtttattaccacaaaaacaa |
| | | caaaagttggatggaaagtgagttcagagtttattctagtgcgaataattgcacttttgaatatgtctctcagccttttcttatggaccttgaaggaaaacagggtaatttcaaaaatctta |
| | | gggaatttgtgtttaagaatattgatggttattttaaaatatattctaagcacacgcctattaatttagtgcgtgatctccctcagggtttttcggctttagaaccattggtagatttgcca |
| | | ataggtattaacatcactaggtttcaaactttacttgctttacatagaagttatttgactcctggtgattcttcttcaggttggacagctggtgctgcagcttattatgtgggttatcttca |
| | | acctaggacttttctattaaaatataatgaaaatggaaccattacagatgctgtagactgtgcacttgaccctctctcagaaacaaagtgtacgttgaaatccttcactgtagaaaa |
| | | aggaatctatcaaacttctaactttagagtccaaccaacagaatctattgttagatttcctaatattacaaacttgtgcccttttggtgaagtttttaacgccaccagatttgcatccgt |
| | | gtatgcttggaacaggaagagaatcagcaactgtgttgctgattattctgtcctatataattccgcatcattttccacttttaagtgttatggagtgtctcctactaaattaaatgatctct |
| | | gctttactaatgtctatgcagattcatttgtaattagaggtgatgaagtcagacaaatcgctccagggcaaactggaaagattgctgattataattataaattaccagatgattttac |
| | | aggctgcgttatagcttggaattctaacaatcttgattctaaggttggtggtaattataattacctgtatagattgtttaggaagtctaatctcaaaccttttgagagagatatttcaact |
| | | gaaatctatcaggccggtagcacaccttgtaatggtgttgaaggttttaattgttactttcctttacaatcatatggtttccaacccactaatggtgttggttaccaaccatacagagta |
| | | gtagtactttcttttgaacttctacatgcaccagcaactgtttgtggacctaaaaagtctactaatttggttaaaaacaaatgtgtcaatttcaacttcaatggtttaacaggcacagg |
| | | tgttcttactgagtctaacaaaaagtttctgcctttccaacaatttggcagagacattgctgacactactgatgctgtccgtgatccacagacacttgagattcttgacattacaccat |
| | | gttcttttggtggtgtcagtgttataacaccaggaacaaatacttctaaccaggttgctgttctttatcaggatgttaactgcacagaagtccctgttgctattcatgcagatcaactta |
| | | ctcctacttggcgtgtttattctacaggttctaatgtttttcaaacacgtgcaggctgtttaataggggctgaacatgtcaacaactcatatgagtgtgacatacccattggtgcaggt |
| | | atatgcgctagttatcagactcagactaattctcctggcagcgccagcagtgtagctagtcaatccatcattgcctacactatgtcacttggtgcagaaaattcagttgcttactcta |
| | | ataactctattgccatacccacaaattttactattagtgttaccacagaaattctaccagtgtctatgaccaagacatcagtagattgtacaatgtacatttgtggtgattcaactgaa |
| | | tgcagcaatcttttgttgcaatatggcagtttttgtacacaattaaaccgtgctttaactggaatagctgttgaacaagacaaaaacacccaagaagtttttgcacaagtcaaaca |
| | | aatttacaaaacaccaccaattaaagattttggtggttttaatttttcacaaatattaccagatccatcaaaaccaagcaagaggtcatttattgaagatctacttttcaacaaagtg |
| | | acacttgcagatgctggcttcatcaaacaatatggtgattgccttggtgatattgctgctagggacctcatttgtgcacaaaagtttaacggccttactgttttgccacctttgctcac |
| | | agatgaaatgattgctcaatacacttctgcactgttagcgggtacaatcacttctggttggacctttggtgcaggtgctgcattacaaataccatttgctatgcaaatggcttatagg |
| | | tttaatggtattggagttacacagaatgttctctatgagaaccaaaaattgattgccaaccaatttaatagtgctattggcaaaattcaagactcactttcttccacagcaagtgca |
| | | cttggaaaacttcaagatgtggtcaaccaaaatgcacaagctttaaacacgcttgttaaacaacttagctccaattttggtgcaatttcaagtgttttaaatgatatcctttcacgtctt |
| | | gaccctcccgaggctgaagtgcaaattgataggttgatcacaggcagacttcaaagtttgcagacatatgtgactcaacaattaattagagctgcagaaatcagagcttctgct |
| | | aatcttgctgctactaaaatgtcagagtgtgtacttggacaatcaaaaagagttgatttttgtggaaagggctatcatcttatgtccttccctcagtcagcacctcatggtgtagtcttc |
| | | ttgcatgtgacttatgtccctgcacaagaaaagaacttcacaactgctcctgccatttgtcatgatggaaaagcacactttcctcgtgaaggtgtctttgtttcaaatggcacacact |
| | | ggtttgtaacacaaaggaatttttatgaaccacaaatcattactacagacaacacatttgtgtctggtaactgtgatgttgtaataggaattgtcaacaacacagtttatgatcctttg |
| | | caacctgaattagactcattcaaggaggagttagataaatattttaagaatcatacatcaccagatgttgatttaggtgacatctctggcattaatgcttcagttgtaaacattcaaa |
| | | aagaaattgaccgcctcaatgaggttgccaagaatttaaatgaatctctcatcgatctccaagaacttggaaagtatgagcagGGGTATATCCCTGAAGCCCC |
| | | CAGGGACGGCCAGGCTTACGTCAGAAAGGATGGAGAGTGGGTGCTCTTGAGCACCTTCCTG |
| 269 | P55 | ATGGGAGTCAAAGTTCTGTTTGCCCTGATCTGCATCGCTGTGGCCGAGGCCAAGgttaatcttacaaccagaactcaattaccccctgc |
| | | atacactaattctttcacacgtggtgtttattaccctgacaaagttttcagatcctcagttttacattcaactcaggatttgttcttacctttcttttccaatgttacttggttccatgcta |
| | | tacatgtctctgggaccaatggtactaagaggtttgataaccctgtcctaccatttaatgatggtgtttattttgcttccactgagaagtctaacataataagaggctggatctttggtact |
| | | actttagattcgaagacccagtccctacttattgttaataacgctactaatgttgttattaaagtctgtgaatttcaattttgtaatgatccatttttgggtgtttattaccacaaaaacaa |
| | | caaaagttggatggaaagtgagttcagagtttattctagtgcgaataattgcacttttgaatatgtctctcagccttttcttatggaccttgaaggaaaacagggtaatttcaaaaatctta |
| | | gggaatttgtgtttaagaatattgatggttattttaaaatatattctaagcacacgcctattaatttagtgcgtgatctccctcagggtttttcggctttagaaccattggtagatttgcca |
| | | ataggtattaacatcactaggtttcaaactttacttgctttacatagaagttatttgactcctggtgattcttcttcaggttggacagctggtgctgcagcttattatgtgggttatcttca |
| | | acctaggacttttctattaaaatataatgaaaatggaaccattacagatgctgtagactgtgcacttgaccctctctcagaaacaaagtgtacgttgaaatccttcactgtagaaaa |
| | | aggaatctatcaaacttctaactttagagtccaaccaacagaatctattgttagatttcctaatattacaaacttgtgcccttttggtgaagtttttaacgccaccagatttgcatccgt |
| | | gtatgcttggaacaggaagagaatcagcaactgtgttgctgattattctgtcctatataattccgcatcattttccacttttaagtgttatggagtgtctcctactaaattaaatgatctct |
| | | gctttactaatgtctatgcagattcatttgtaattagaggtgatgaagtcagacaaatcgctccagggcaaactggaaagattgctgattataattataaattaccagatgattttac |
| | | aggctgcgttatagcttggaattctaacaatcttgattctaaggttggtggtaattataattacctgtatagattgtttaggaagtctaatctcaaaccttttgagagagatatttcaact |
| | | gaaatctatcaggccggtagcacaccttgtaatggtgttgaaggttttaattgttactttcctttacaatcatatggtttccaacccactaatggtgttggttaccaaccatacagagta |
| | | gtagtactttcttttgaacttctacatgcaccagcaactgtttgtggacctaaaaagtctactaatttggttaaaaacaaatgtgtcaatttcaacttcaatggtttaacaggcacagg |
| | | tgttcttactgagtctaacaaaaagtttctgcctttccaacaatttggcagagacattgctgacactactgatgctgtccgtgatccacagacacttgagattcttgacattacaccat |
| | | gttcttttggtggtgtcagtgttataacaccaggaacaaatacttctaaccaggttgctgttctttatcaggatgttaactgcacagaagtccctgttgctattcatgcagatcaactta |
| | | ctcctacttggcgtgtttattctacaggttctaatgtttttcaaacacgtgcaggctgtttaataggggctgaacatgtcaacaactcatatgagtgtgacatacccattggtgcaggt |
| | | atatgcgctagttatcagactcagactaattctcctggcagcgccagcagtgtagctagtcaatccatcattgcctacactatgtcacttggtgcagaaaattcagttgcttactcta |
| | | ataactctattgccatacccacaaattttactattagtgttaccacagaaattctaccagtgtctatgaccaagacatcagtagattgtacaatgtacatttgtggtgattcaactgaa |
| | | tgcagcaatcttttgttgcaatatggcagtttttgtacacaattaaaccgtgctttaactgggatagctgttgaacaagacaaaaacacccaagaagtttttgcacaagtcaaaca |
| | | aatttacaaaacaccaccaattaaagattttggtggttttaatttttcacaaatattaccagatccatcaaaaccaagcaagaggtcatttattgaagatctacttttcaacaaagtg |
| | | acacttgcagatgctggcttcatcaaacaatatggtgattgccttggtgatattgctgctagggacctcatttgtgcacaaaagtttaacggccttactgttttgccacctttgctcac |
| | | agatgaaatgattgctcaatacacttctgcactgttagcgggtacaatcacttctggttggacctttggtgcaggtgctgcattacaaataccatttgctatgcaaatggcttatagg |
| | | tttaatggtattggagttacacagaatgttctctatgagaaccaaaaattgattgccaaccaatttaatagtgccattggcaaaattcaagactcactttcttccacagcaagtgca |
| | | cttggaaaacttcaagatgtggtcaaccaaaatgcacaagctttaaacacgcttgttaaacaacttagctccaattttggtgcaatttcaagtgttttaaatgatatcctttcacgtctt |
| | | gaccctcccgaggctgaagtgcaaattgataggttgatcacaggcagacttcaaagtttgcagacatatgtgactcaacaattaattagagctgcagaaatcagagcttctgct |
| | | aatcttgctgctactaaaatgtcagagtgtgtacttggacaatcaaaaagagttgatttttgtggaaagggctatcatcttatgtccttccctcagtcagcacctcatggtgtagtcttc |
| | | ttgcatgtgacttatgtccctgcacaagaaaagaacttcacaactgctcctgccatttgtcatgatggaaaagcacactttcctcgtgaaggtgtctttgtttcaaatggcacacact |
| | | ggtttgtaacacaaaggaatttttatgaaccacaaatcattactacagacaacacatttgtgtctggtaactgtgatgttgtaataggaattgtcaacaacacagtttatgatcctttg |
| | | caacctgaattagactcattcaaggaggagttagataaatattttaagaatcatacatcaccagatgttgatttaggtgacatctctggcattaatgcttcagttgtaaacattcaaa |
| | | aagaaattgaccgcctcaatgaggttgccaagaatttaaatgaatctctcatcgatctccaagaacttggaaagtatgagcagtatataaaatggccatggtacatttggctag |
| | | gttttatagctggcttgattgccatagtaatggtgacaattatgctttgctgtatgaccagttgctgtagttgtctcaagggctgttgttcttgtggatcctgctgcaaatttgatgaagac |
| | | gactctgagccagtgctcaaaggagtcaaattacattacaca |
| 270 | P57 | ATGGGAGTCAAAGTTCTGTTTGCCCTGATCTGCATCGCTGTGGCCGAGGCCAAGagagtccaaccaacagaatctattgttagatttcc |
| | | taatattacaaacttgtgcccttttggtgaagtttttaacgccaccagatttgcatccgtgtatgcttggaacaggaagagaatcagcaactgtgttgctgattattctgtcctatataa |
| | | ttccgcatcattttccacttttaagtgttatggagtgtctcctactaaattaaatgatctctgctttactaatgtctatgcagattcatttgtaattagaggtgatgaagtcagacaaatcg |
| | | ctccagggcaaactggaaagattgctgattataattataaattaccagatgattttacaggctgcgttatagcttggaattctaacaatcttgattctaaggttggtggtaattataatt |
| | | acctgtatagattgtttaggaagtctaatctcaaaccttttgagagagatatttcaactgaaatctatcaggccggtagcacaccttgtaatggtgttgaaggttttaattgttactttcc |
| | | tttacaatcatatggtttccaacccactaatggtgttggttaccaaccatacagagtagtagtactttcttttgaacttctacatgcaccagcaactgtttgtggacctaaaaagtcta |
| | | ctaatttggttaaaaacaaatgtgtcaatttcGGGTATATCCCTGAAGCCCCCAGGGACGGCCAGGCTTACGTCAGAAAGGATGGAGA |
| | | GTGGGTGCTCTTGAGCACCTTCCTGTAA |
| 271 | P58 | atgtttgtttttcttgttttattgccactagtctctagtcagtgtgttaatcttacaaccagaactcaattaccccctgcatacactaattctttcacacgtggtgtttattaccctgacaa |
| | | agttttcagatcctcagttttacattcaactcaggatttgttcttacctttcttttccaatgttacttggttccatgctatacatgtctctgggaccaatggtactaagaggtttgataacc |
| | | ctgtcctaccatttaatgatggtgtttattttgcttccactgagaagtctaacataataagaggctggatctttggtactactttagattcgaagacccagtccctacttattgttaataac |
| | | gctactaatgttgttattaaagtctgtgaatttcaattttgtaatgatccatttttgggtgtttattaccacaaaaacaacaaaagttggatggaaagtgagttcagagtttattctagtgc |
| | | gaataattgcacttttgaatatgtctctcagccttttcttatggaccttgaaggaaaacagggtaatttcaaaaatcttagggaatttgtgtttaagaatattgatggttattttaaaatat |
| | | attctaagcacacgcctattaatttagtgcgtgatctccctcagggtttttcggctttagaaccattggtagatttgccaataggtattaacatcactaggtttcaaactttacttgcttta |
| | | catagaagttatttgactcctggtgattcttcttcaggttggacagctggtgctgcagcttattatgtgggttatcttcaacctaggacttttctattaaaatataatgaaaatggaaccat |
| | | tacagatgctgtagactgtgcacttgaccctctctcagaaacaaagtgtacgttgaaatccttcactgtagaaaaaggaatctatcaaacttctaactttagagtccaaccaacaga |
| | | atctattgttagatttcctaatattacaaacttgtgcccttttggtgaagtttttaacgccaccagatttgcatccgtgtatgcttggaacaggaagagaatcagcaactgtgttgctga |
| | | ttattctgtcctatataattccgcatcattttccacttttaagtgttatggagtgtctcctactaaattaaatgatctctgctttactaatgtctatgcagattcatttgtaattagaggtg |
| | | atgaagtcagacaaatcgctccagggcaaactggaaagattgctgattataattataaattaccagatgattttacaggctgcgttatagcttggaattctaacaatcttgattctaaggtt |
| | | ggtggtaattataattacctgtatagattgtttaggaagtctaatctcaaaccttttgagagagatatttcaactgaaatctatcaggccggtagcacaccttgtaatggtgttgaag |
| | | gttttaattgttactttcctttacaatcatatggtttccaacccactaatggtgttggttaccaaccatacagagtagtagtactttcttttgaacttctacatgcaccagcaactgtttgt |
| | | ggacctaaaaagtctactaatttggttaaaaacaaatgtgtcaatttcaacttcaatggtttaacaggcacaggtgttcttactgagtctaacaaaaagtttctgcctttccaacaattt |
| | | ggcagagacattgctgacactactgatgctgtccgtgatccacagacacttgagattcttgacattacaccatgttcttttggtggtgtcagtgttataacaccaggaacaaatact |
| | | tctaaccaggttgctgttctttatcagggtgttaactgcacagaagtccctgttgctattcatgcagatcaacttactcctacttggcgtgtttattctacaggttctaatgtttttcaaac |
| | | acgtgcaggctgtttaataggggctgaacatgtcaacaactcatatgagtgtgacatacccattggtgcaggtatatgcgctagttatcagactcagactaattctcctggcagcg |
| | | ccagcagtgtagctagtcaatccatcattgcctacactatgtcacttggtgcagaaaattcagttgcttactctaataactctattgccatacccacaaattttactattagtgttacca |
| | | cagaaattctaccagtgtctatgaccaagacatcagtagattgtacaatgtacatttgtggtgattcaactgaatgcagcaatcttttgttgcaatatggcagtttttgtacacaatta |
| | | aaccgtgctttaactgggatagctgttgaacaagacaaaaacacccaagaagtttttgcacaagtcaaacaaatttacaaaacaccaccaattaaagattttggtggttttaatt |
| | | tttcacaaatattaccagatccatcaaaaccaagcaagaggtcatttattgaagatctacttttcaacaaagtgacacttgcagatgctggcttcatcaaacaatatggtgattgc |
| | | cttggtgatattgctgctagggacctcatttgtgcacaaaagtttaacggccttactgttttgccacctttgctcacagatgaaatgattgctcaatacacttctgcactgttagcgggt |
| | | acaatcacttctggttggacctttggtgcaggtgctgcattacaaataccatttgctatgcaaatggcttataggtttaatggtattggagttacacagaatgttctctatgagaacca |
| | | aaaattgattgccaaccaatttaatagtgccattggcaaaattcaagactcactttcttccacagcaagtgcacttggaaaacttcaagatgtggtcaaccaaaatgcacaagc |
| | | tttaaacacgcttgttaaacaacttagctccaattttggtgcaatttcaagtgttttaaatgatatcctttcacgtcttgaccctcccgaggctgaagtgcaaattgataggttgatcac |
| | | aggcagacttcaaagtttgcagacatatgtgactcaacaattaattagagctgcagaaatcagagcttctgctaatcttgctgctactaaaatgtcagagtgtgtacttggacaat |
| | | caaaaagagttgatttttgtggaaagggctatcatcttatgtccttccctcagtcagcacctcatggtgtagtcttcttgcatgtgacttatgtccctgcacaagaaaagaacttcac |
| | | aactgctcctgccatttgtcatgatggaaaagcacactttcctcgtgaaggtgtctttgtttcaaatggcacacactggtttgtaacacaaaggaatttttatgaaccacaaatcatt |
| | | actacagacaacacatttgtgtctggtaactgtgatgttgtaataggaattgtcaacaacacagtttatgatcctttgcaacctgaattagactcattcaaggaggagttagataaa |
| | | tattttaagaatcatacatcaccagatgttgatttaggtgacatctctggcattaatgcttcagttgtaaacattcaaaaagaaattgaccgcctcaatgaggttgccaagaatttaa |
| | | atgaatctctcatcgatctccaagaacttggaaagtatgagcagtatataaaatggccatggtacatttggctaggttttatagctggcttgattgccatagtaatggtgacaattat |
| | | gctttgctgtatgaccagttgctgtagttgtctcaagggctgttgttcttgtggatcctgctgcaaatttgatgaagacgactctgagccagtgctcaaaggagtcaaattacattac |
| | | aca |
| 272 | 2A2361 | ATGGGAGTCAAAGTTCTGTTTGCCCTGATCTGCATTGCTGTGGCCGAGGCCAAGAGAGTCCAACCAACAGAATCTATT |
| | | GTTAGATTTCCTAATATTACAAACTTGTGCCCTTTTGGTGAAGTTTTTAACGCCACCAGATTTGCATCCGTGTATGCTTG |
| | | GAACAGGAAGAGAATCAGCAACTGTGTTGCTGATTATTCTGTCCTATATAATTCCGCATCATTTTCCACTTTTAAGTGTT |
| | | ATGGAGTGTCTCCTACTAAATTAAATGATCTCTGCTTTACTAATGTCTATGCAGATTCATTTGTAATTAGAGGTGATGAA |
| | | GTCAGACAAATCGCTCCAGGGCAAACTGGAAAGATTGCTGATTATAATTATAAATTACCAGATGATTTTACAGGCTGCG |
| | | TTATAGCTTGGAATTCTAACAATCTTGATTCTAAGGTTGGTGGTAATTATAATTACCTGTATAGATTGTTTAGGAAGTCT |
| | | AATCTCAAACCTTTTGAGAGAGATATTTCAACTGAAATCTATCAGGCCGGTAGCACACCTTGTAATGGTGTTGAAGGTT |
| | | TTAATTGTTACTTTCCTTTACAATCATATGGTTTCCAACCCACTAATGGTGTTGGTTACCAACCATACAGAGTAGTAGTA |
| | | CTTTCTTTTGAACTTCTACATGCACCAGCAACTGTTTGTGGACCTAAAAAGTCTACTAATTTGGTTAAAAACAAATGTGT |
| | | CAATTTCGGAGGAGGAGGAAGCGGATACATCCCCGAGGCCCCCCGGGACGGCCAGGCCTACGTGCGGAAGGACGG |
| | | CGAGTGGGTGCTGCTCAGCACCTTCCTG |
| 273 | 2A3361 | ATGGGAGTCAAAGTTCTGTTTGCCCTGATCTGCATTGCTGTGGCCGAGGCCAAGAGAGTCCAACCAACAGAATCTATT |
| | | GTTAGATTTCCTAATATTACAAACTTGTGCCCTTTTGGTGAAGTTTTTAACGCCACCAGATTTGCATCCGTGTATGCTTG |
| | | GAACAGGAAGAGAATCAGCAACTGTGTTGCTGATTATTCTGTCCTATATAATTCCGCATCATTTTCCACTTTTAAGTGTT |
| | | ATGGAGTGTCTCCTACTAAATTAAATGATCTCTGCTTTACTAATGTCTATGCAGATTCATTTGTAATTAGAGGTGATGAA |
| | | GTCAGACAAATCGCTCCAGGGCAAACTGGAAAGATTGCTGATTATAATTATAAATTACCAGATGATTTTACAGGCTGCG |
| | | TTATAGCTTGGAATTCTAACAATCTTGATTCTAAGGTTGGTGGTAATTATAATTACCTGTATAGATTGTTTAGGAAGTCT |
| | | AATCTCAAACCTTTTGAGAGAGATATTTCAACTGAAATCTATCAGGCCGGTAGCACACCTTGTAATGGTGTTGAAGGTT |
| | | TTAATTGTTACTTTCCTTTACAATCATATGGTTTCCAACCCACTAATGGTGTTGGTTACCAACCATACAGAGTAGTAGTA |
| | | CTTTCTTTTGAACTTCTACATGCACCAGCAACTGTTTGTGGACCTAAAAAGTCTACTAATTTGGTTAAAAACAAATGTGT |
| | | CAATTTCGGAGGAGGAGGAAGCGGATACATCCCCGAGGCCCCCCGGGACGGCCAGGCCTACGTGCGGAAGGACGG |
| | | CGAGTGGGTGCTGCTCAGCACCTTCCTGGGAGGAGGAGGAAGCAGAGTCCAACCAACAGAATCTATTGTTAGATTTC |
| | | CTAATATTACAAACTTGTGCCCTTTTGGTGAAGTTTTTAACGCCACCAGATTTGCATCCGTGTATGCTTGGAACAGGAA |
| | | GAGAATCAGCAACTGTGTTGCTGATTATTCTGTCCTATATAATTCCGCATCATTTTCCACTTTTAAGTGTTATGGAGTGT |
| | | CTCCTACTAAATTAAATGATCTCTGCTTTACTAATGTCTATGCAGATTCATTTGTAATTAGAGGTGATGAAGTCAGACAA |
| | | ATCGCTCCAGGGCAAACTGGAAAGATTGCTGATTATAATTATAAATTACCAGATGATTTTACAGGCTGCGTTATAGCTT |
| | | GGAATTCTAACAATCTTGATTCTAAGGTTGGTGGTAATTATAATTACCTGTATAGATTGTTTAGGAAGTCTAATCTCAAA |
| | | CCTTTTGAGAGAGATATTTCAACTGAAATCTATCAGGCCGGTAGCACACCTTGTAATGGTGTTGAAGGTTTTAATTGTT |
| | | ACTTTCCTTTACAATCATATGGTTTCCAACCCACTAATGGTGTTGGTTACCAACCATACAGAGTAGTAGTACTTTCTTTT |
| | | GAACTTCTACATGCACCAGCAACTGTTTGTGGACCTAAAAAGTCTACTAATTTGGTTAAAAACAAATGTGTCAATTTC |
| 274 | 2A6361 | ATGGGAGTCAAAGTTCTGTTTGCCCTGATCTGCATTGCTGTGGCCGAGGCCAAGAGAGTCCAACCAACAGAATCTATT |
| | | GTTAGATTTCCTAATATTACAAACTTGTGCCCTTTTGGTGAAGTTTTTAACGCCACCAGATTTGCATCCGTGTATGCTTG |
| | | GAACAGGAAGAGAATCAGCAACTGTGTTGCTGATTATTCTGTCCTATATAATTCCGCATCATTTTCCACTTTTAAGTGTT |
| | | ATGGAGTGTCTCCTACTAAATTAAATGATCTCTGCTTTACTAATGTCTATGCAGATTCATTTGTAATTAGAGGTGATGAA |
| | | GTCAGACAAATCGCTCCAGGGCAAACTGGAAAGATTGCTGATTATAATTATAAATTACCAGATGATTTTACAGGCTGCG |
| | | TTATAGCTTGGAATTCTAACAATCTTGATTCTAAGGTTGGTGGTAATTATAATTACCTGTATAGATTGTTTAGGAAGTCT |
| | | AATCTCAAACCTTTTGAGAGAGATATTTCAACTGAAATCTATCAGGCCGGTAGCACACCTTGTAATGGTGTTGAAGGTT |
| | | TTAATTGTTACTTTCCTTTACAATCATATGGTTTCCAACCCACTAATGGTGTTGGTTACCAACCATACAGAGTAGTAGTA |
| | | CTTTCTTTTGAACTTCTACATGCACCAGCAACTGTTTGTGGACCTAAAAAGTCTACTAATTTGGTTAAAAACAAATGTGT |
| | | CAATTTCGACATCATTAAGCTGCTCAACGAGCAGGTGAACAAGGAGATGAACAGCTCCAACCTGTACATGAGCATGAG |
| | | CAGCTGGTGCTACACCCACAGCCTGGACGGCGCCGGCCTGTTCCTGTTTGACCACGCCGCTGAGGAATACGAGCAC |
| | | GCCAAGAAACTGATCGTGTTCCTGAACGAGAACAACGTGCCCGTGCAGCTGACCAGCATCAGCGCCCCCGAGCACA |
| | | AGTTCGAGAGCCTGACCCAGATCTTCCAGAAGGCCTACGAGCACGAGCAGCACATCAGCGAGAGCATCAACAACATC |
| | | GTCGACCACGCCATCAAGGGCAAGGACCACGCCACCTTCAACTTCCTGCAGTGGTACGTGAGCGAGCAGCACGAGG |
| | | AGGAGGTGCTGTTCAAGGACATCCTGGACAAGATCGAGCTGATCGGCAACGAGAACCACGGCCTGTACCTGGCCGA |
| | | CCAGTACGTGAAGGGCATCGCCAAGAGCCGCAAAAGT |
| 275 | 2A7361 | ATGGGAGTCAAAGTTCTGTTTGCCCTGATCTGCATTGCTGTGGCCGAGGCCAAGAGAGTCCAACCAACAGAATCTATT |
| | | GTTAGATTTCCTAATATTACAAACTTGTGCCCTTTTGGTGAAGTTTTTAACGCCACCAGATTTGCATCCGTGTATGCTTG |
| | | GAACAGGAAGAGAATCAGCAACTGTGTTGCTGATTATTCTGTCCTATATAATTCCGCATCATTTTCCACTTTTAAGTGTT |
| | | ATGGAGTGTCTCCTACTAAATTAAATGATCTCTGCTTTACTAATGTCTATGCAGATTCATTTGTAATTAGAGGTGATGAA |
| | | GTCAGACAAATCGCTCCAGGGCAAACTGGAAAGATTGCTGATTATAATTATAAATTACCAGATGATTTTACAGGCTGCG |
| | | TTATAGCTTGGAATTCTAACAATCTTGATTCTAAGGTTGGTGGTAATTATAATTACCTGTATAGATTGTTTAGGAAGTCT |
| | | AATCTCAAACCTTTTGAGAGAGATATTTCAACTGAAATCTATCAGGCCGGTAGCACACCTTGTAATGGTGTTGAAGGTT |
| | | TTAATTGTTACTTTCCTTTACAATCATATGGTTTCCAACCCACTAATGGTGTTGGTTACCAACCATACAGAGTAGTAGTA |
| | | CTTTCTTTTGAACTTCTACATGCACCAGCAACTGTTTGTGGACCTAAAAAGTCTACTAATTTGGTTAAAAACAAATGTGT |
| | | CAATTTCGGAGGAGGAGGAAGCGACATCATTAAGCTGCTCAACGAGCAGGTGAACAAGGAGATGAACAGCTCCAACC |
| | | TGTACATGAGCATGAGCAGCTGGTGCTACACCCACAGCCTGGACGGCGCCGGCCTGTTCCTGTTTGACCACGCCGC |
| | | TGAGGAATACGAGCACGCCAAGAAACTGATCGTGTTCCTGAACGAGAACAACGTGCCCGTGCAGCTGACCAGCATCA |
| | | GCGCCCCCGAGCACAAGTTCGAGAGCCTGACCCAGATCTTCCAGAAGGCCTACGAGCACGAGCAGCACATCAGCGA |
| | | GAGCATCAACAACATCGTCGACCACGCCATCAAGGGCAAGGACCACGCCACCTTCAACTTCCTGCAGTGGTACGTGA |
| | | GCGAGCAGCACGAGGAGGAGGTGCTGTTCAAGGACATCCTGGACAAGATCGAGCTGATCGGCAACGAGAACCACGG |
| | | CCTGTACCTGGCCGACCAGTACGTGAAGGGCATCGCCAAGAGCCGCAAAAGT |
| 276 | 2A8361 | ATGGGAGTCAAAGTTCTGTTTGCCCTGATCTGCATTGCTGTGGCCGAGGCCAAGAGAGTCCAACCAACAGAATCTATT |
| | | GTTAGATTTCCTAATATTACAAACTTGTGCCCTTTTGGTGAAGTTTTTAACGCCACCAGATTTGCATCCGTGTATGCTTG |
| | | GAACAGGAAGAGAATCAGCAACTGTGTTGCTGATTATTCTGTCCTATATAATTCCGCATCATTTTCCACTTTTAAGTGTT |
| | | ATGGAGTGTCTCCTACTAAATTAAATGATCTCTGCTTTACTAATGTCTATGCAGATTCATTTGTAATTAGAGGTGATGAA |
| | | GTCAGACAAATCGCTCCAGGGCAAACTGGAAAGATTGCTGATTATAATTATAAATTACCAGATGATTTTACAGGCTGCG |
| | | TTATAGCTTGGAATTCTAACAATCTTGATTCTAAGGTTGGTGGTAATTATAATTACCTGTATAGATTGTTTAGGAAGTCT |
| | | AATCTCAAACCTTTTGAGAGAGATATTTCAACTGAAATCTATCAGGCCGGTAGCACACCTTGTAATGGTGTTGAAGGTT |
| | | TTAATTGTTACTTTCCTTTACAATCATATGGTTTCCAACCCACTAATGGTGTTGGTTACCAACCATACAGAGTAGTAGTA |
| | | CTTTCTTTTGAACTTCTACATGCACCAGCAACTGTTTGTGGACCTAAAAAGTCTACTAATTTGGTTAAAAACAAATGTGT |
| | | CAATTTCCCCGGCAGCGGCTACATCCCCGAGGCCCCCCGGGACGGCCAGGCCTACGTGCGGAAGGACGGCGAGTG |
| | | GGTGCTGCTCAGCACCTTCCTGAGCGGCCGGAGCGGCGGAGACATCATTAAGCTGCTGAACGAGCAGGTGAACAAG |
| | | GAGATGAACAGCTCCAACCTGTACATGAGCATGAGCAGCTGGTGCTACACCCACAGCCTGGACGGCGCCGGCCTGT |
| | | TCCTGTTTGACCACGCCGCTGAGGAATACGAGCACGCCAAGAAACTGATCGTGTTCCTGAACGAGAACAACGTGCCC |
| | | GTGCAGCTGACCAGCATCAGCGCCCCCGAGCACAAGTTCGAGAGCCTGACCCAGATCTTCCAGAAGGCCTACGAGC |
| | | ACGAGCAGCACATCAGCGAGAGCATCAACAACATCGTCGACCACGCCATCAAGGGCAAGGACCACGCCACCTTCAA |
| | | CTTCCTGCAGTGGTACGTGAGCGAGCAGCACGAGGAGGAGGTGCTGTTCAAGGACATCCTGGACAAGATCGAGCTG |
| | | ATCGGCAACGAGAACCACGGCCTGTACCTGGCCGACCAGTACGTGAAGGGCATCGCCAAGAGCCGCAAAAGT |
| 277 | 2A9361 | ATGGGAGTCAAAGTTCTGTTTGCCCTGATCTGCATTGCTGTGGCCGAGGCCAAGAGAGTCCAACCAACAGAATCTATT |
| | | GTTAGATTTCCTAATATTACAAACTTGTGCCCTTTTGGTGAAGTTTTTAACGCCACCAGATTTGCATCCGTGTATGCTTG |
| | | GAACAGGAAGAGAATCAGCAACTGTGTTGCTGATTATTCTGTCCTATATAATTCCGCATCATTTTCCACTTTTAAGTGTT |
| | | ATGGAGTGTCTCCTACTAAATTAAATGATCTCTGCTTTACTAATGTCTATGCAGATTCATTTGTAATTAGAGGTGATGAA |
| | | GTCAGACAAATCGCTCCAGGGCAAACTGGAAAGATTGCTGATTATAATTATAAATTACCAGATGATTTTACAGGCTGCG |
| | | TTATAGCTTGGAATTCTAACAATCTTGATTCTAAGGTTGGTGGTAATTATAATTACCTGTATAGATTGTTTAGGAAGTCT |
| | | AATCTCAAACCTTTTGAGAGAGATATTTCAACTGAAATCTATCAGGCCGGTAGCACACCTTGTAATGGTGTTGAAGGTT |
| | | TTAATTGTTACTTTCCTTTACAATCATATGGTTTCCAACCCACTAATGGTGTTGGTTACCAACCATACAGAGTAGTAGTA |
| | | CTTTCTTTTGAACTTCTACATGCACCAGCAACTGTTTGTGGACCTAAAAAGTCTACTAATTTGGTTAAAAACAAATGTGT |
| | | CAATTTCATCAACCACGTGGGCGGAACCGGCGGCGCCATCATGGCCCCCGTGGCCGTGACCCGGCAGCTGGTGGG |
| | | CAGC |
| 278 | 2A0461 | ATGGGAGTCAAAGTTCTGTTTGCCCTGATCTGCATTGCTGTGGCCGAGGCCAAGAGAGTCCAACCAACAGAATCTATT |
| | | GTTAGATTTCCTAATATTACAAACTTGTGCCCTTTTGGTGAAGTTTTTAACGCCACCAGATTTGCATCCGTGTATGCTTG |
| | | GAACAGGAAGAGAATCAGCAACTGTGTTGCTGATTATTCTGTCCTATATAATTCCGCATCATTTTCCACTTTTAAGTGTT |
| | | ATGGAGTGTCTCCTACTAAATTAAATGATCTCTGCTTTACTAATGTCTATGCAGATTCATTTGTAATTAGAGGTGATGAA |
| | | GTCAGACAAATCGCTCCAGGGCAAACTGGAAAGATTGCTGATTATAATTATAAATTACCAGATGATTTTACAGGCTGCG |
| | | TTATAGCTTGGAATTCTAACAATCTTGATTCTAAGGTTGGTGGTAATTATAATTACCTGTATAGATTGTTTAGGAAGTCT |
| | | AATCTCAAACCTTTTGAGAGAGATATTTCAACTGAAATCTATCAGGCCGGTAGCACACCTTGTAATGGTGTTGAAGGTT |
| | | TTAATTGTTACTTTCCTTTACAATCATATGGTTTCCAACCCACTAATGGTGTTGGTTACCAACCATACAGAGTAGTAGTA |
| | | CTTTCTTTTGAACTTCTACATGCACCAGCAACTGTTTGTGGACCTAAAAAGTCTACTAATTTGGTTAAAAACAAATGTGT |
| | | CAATTTCGGAGGAGGAGGAAGCATCAACCACGTGGGGGAACCGGCGGCGCCATCATGGCCCCCGTGGCCGTGAC |
| | | CCGGCAGCTGGTGGGCAGC |
| 279 | 2A1461 | ATGGGAGTCAAAGTTCTGTTTGCCCTGATCTGCATTGCTGTGGCCGAGGCCAAGATCAACCACGTGGGGGGAACCGG |
| | | CGGCGCCATCATGGCCCCCGTGGCCGTGACCCGGCAGCTGGTGGGCAGCAGAGTCCAACCAACAGAATCTATTGTT |
| | | AGATTTCCTAATATTACAAACTTGTGCCCTTTTGGTGAAGTTTTTAACGCCACCAGATTTGCATCCGTGTATGCTTGGA |
| | | ACAGGAAGAGAATCAGCAACTGTGTTGCTGATTATTCTGTCCTATATAATTCCGCATCATTTTCCACTTTTAAGTGTTAT |
| | | GGAGTGTCTCCTACTAAATTAAATGATCTCTGCTTTACTAATGTCTATGCAGATTCATTTGTAATTAGAGGTGATGAAGT |
| | | CAGACAAATCGCTCCAGGGCAAACTGGAAAGATTGCTGATTATAATTATAAATTACCAGATGATTTTACAGGCTGCGTT |
| | | ATAGCTTGGAATTCTAACAATCTTGATTCTAAGGTTGGTGGTAATTATAATTACCTGTATAGATTGTTTAGGAAGTCTAA |
| | | TCTCAAACCTTTTGAGAGAGATATTTCAACTGAAATCTATCAGGCCGGTAGCACACCTTGTAATGGTGTTGAAGGTTTT |
| | | AATTGTTACTTTCCTTTACAATCATATGGTTTCCAACCCACTAATGGTGTTGGTTACCAACCATACAGAGTAGTAGTACT |
| | | TTCTTTTGAACTTCTACATGCACCAGCAACTGTTTGTGGACCTAAAAAGTCTACTAATTTGGTTAAAAACAAATGTGTCA |
| | | ATTTC |
| 280 | 2A2461 | ATGGGAGTCAAAGTTCTGTTTGCCCTGATCTGCATTGCTGTGGCCGAGGCCAAGATCAACCACGTGGGGGGAACCGG |
| | | CGGCGCCATCATGGCCCCCGTGGCCGTGACCCGGCAGCTGGTGGGCAGCGGAGGAGGAGGAAGCAGAGTCCAAC |
| | | CAACAGAATCTATTGTTAGATTTCCTAATATTACAAACTTGTGCCCTTTTGGTGAAGTTTTTAACGCCACCAGATTTGCA |
| | | TCCGTGTATGCTTGGAACAGGAAGAGAATCAGCAACTGTGTTGCTGATTATTCTGTCCTATATAATTCCGCATCATTTT |
| | | CCACTTTTAAGTGTTATGGAGTGTCTCCTACTAAATTAAATGATCTCTGCTTTACTAATGTCTATGCAGATTCATTTGTA |
| | | ATTAGAGGTGATGAAGTCAGACAAATCGCTCCAGGGCAAACTGGAAAGATTGCTGATTATAATTATAAATTACCAGATG |
| | | ATTTTACAGGCTGCGTTATAGCTTGGAATTCTAACAATCTTGATTCTAAGGTTGGTGGTAATTATAATTACCTGTATAGA |
| | | TTGTTTAGGAAGTCTAATCTCAAACCTTTTGAGAGAGATATTTCAACTGAAATCTATCAGGCCGGTAGCACACCTTGTA |
| | | ATGGTGTTGAAGGTTTTAATTGTTACTTTCCTTTACAATCATATGGTTTCCAACCCACTAATGGTGTTGGTTACCAACCA |
| | | TACAGAGTAGTAGTACTTTCTTTTGAACTTCTACATGCACCAGCAACTGTTTGTGGACCTAAAAAGTCTACTAATTTGGT |
| | | TAAAAACAAATGTGTCAATTTC |
| 281 | 2A7520 | ATGGGAGTCAAAGTTCTGTTTGCCCTGATCTGCATTGCTGTGGCCGAGGCCAAGAGAGTCCAACCAACAGAATCTATT |
| | | GTTAGATTTCCTAATATTACAAACTTGTGCCCTTTTGGTGAAGTTTTTAACGCCACCAGATTTGCATCCGTGTATGCTTG |
| | | GAACAGGAAGAGAATCAGCAACTGTGTTGCTGATTATTCTGTCCTATATAATTCCGCATCATTTTCCACTTTTAAGTGTT |
| | | ATGGAGTGTCTCCTACTAAATTAAATGATCTCTGCTTTACTAATGTCTATGCAGATTCATTTGTAATTAGAGGTGATGAA |
| | | GTCAGACAAATCGCTCCAGGGCAAACTGGAAAGATTGCTGATTATAATTATAAATTACCAGATGATTTTACAGGCTGCG |
| | | TTATAGCTTGGAATTCTAACAATCTTGATTCTAAGGTTGGTGGTAATTATAATTACCTGTATAGATTGTTTAGGAAGTCT |
| | | AATCTCAAACCTTTTGAGAGAGATATTTCAACTGAAATCTATCAGGCCGGTAGCACACCTTGTAATGGTGTTGAAGGTT |
| | | TTAATTGTTACTTTCCTTTACAATCATATGGTTTCCAACCCACTAATGGTGTTGGTTACCAACCATACAGAGTAGTAGTA |
| | | CTTTCTTTTGAACTTCTACATGCACCAGCAACTGTTTGTGGACCTAAAAAGTCTACTAATTTGGTTAAAAACAAATGTGT |
| | | CAATTTCGGGTATATCCCTGAAGCCCCCAGGGACGGCCAGGCTTACGTCAGAAAGGATGGAGAGTGGGTGCTCTTGA |
| | | GCACCTTCCTGTAA |
| 283 | Omicron | MFVFLVLLPLVSSQCVNLITRTQSYTNSFTRGVYYPDKVFRSSVLHSTQDLFLPFFSNVTWFHAISGTNGIKRFDNPVLPFN |
| | spike | DGVYFASTEKSNIIRGWIFGTTLDSKTQSLLIVNNATNVVIKVCEFQFCNDPFLDVYYHKNNKSWMESEFRVYSSANNCTFE |
| | protein | YVSQPFLMDLEGKQGNFKNLREFVFKNIDGYFKIYSKHTPINLGRDLPQGFSALEPLVDLPIGINITRFQTLLALHRSYLTPGD |
| | | SSSGWTAGAAAYYVGYLQPRTFLLKYNENGTITDAVDCALDPLSETKCTLKSFTVEKGIYQTSNFRVQPTESIVRFPNITNLC |
| | | PFDEVFNATRFASVYAWNRKRISNCVADYSVLYNFAPFFAFKCYGVSPTKLNDLCFTNVYADSFVIRGNEVSQIAPGQTGNI |
| | | ADYNYKLPDDFTGCVIAWNSNKLDSKVGGNYNYRYRLFRKSNLKPFERDISTEIYQAGNKPCNGVAGVNCYFPLQSYGFR |
| | | PTYGVGHQPYRVVVLSFELLHAPATVCGPKKSTNLVKNKCVNFNFNGLTGTGVLTESNKKFLPFQQFGRDIADTTDAVRDP |
| | | QTLEILDITPCSFGGVSVITPGTNTSNQVAVLYQGVNCTEVPVAIHADQLTPTWRVYSTGSNVFQTRAGCLIGAEYVNNSYE |
| | | CDIPIGAGICASYQTQTKSHRRARSVASQSIIAYTMSLGAENSVAYSNNSIAIPTNFTISVTTEILPVSMTKTSVDCTMYICGDS |
| | | TECSNLLLQYGSFCTQLKRALTGIAVEQDKNTQEVFAQVKQIYKTPPIKYFGGFNFSQILPDPSKPSKRSFIEDLLFNKVTLAD |
| | | AGFIKQYGDCLGDIAARDLICAQKFNGLTVLPPLLTDEMIAQYTSALLAGTITSGWTFGAGAALQIPFAMQMAYRFNGIGVTQ |
| | | NVLYENQKLIANQFNSAIGKIQDSLSSTASALGKLQDVVNHNAQALNTLVKQLSSKFGAISSVLNDILSRLDKVEAEVQIDRLI |
| | | TGRLQSLQTYVTQQLIRAAEIRASANLAATKMSECVLGQSKRVDFCGKGYHLMSFPQSAPHGVVFLHVTYVPAQEKNFTTA |
| | | PAICHDGKAHFPREGVFVSNGTHWFVTQRNFYEPQIITTDNTFVSGNCDVVIGIVNNTVYDPLQPELDSFKEELDKYFKNHT |
| | | SPDVDLGDISGINASVVNIQKEIDRLNEVAKNLNESLIDLQELGKYEQYIKWPWYIWLGFIAGLIAIVMVTIMLCCMTSCCSCLK |
| | | GCCSCGSCCKFDEDDSEPVLKGVKLHYT |
| 284 | Omicron- | MGVFLVLLPLVSSQCVNLITRTQSYTNSFTRGVYYPDKVFRSSVLHSTQDLFLPFFSNVTWFHAISGTNGIKRFDNPVLPFN |
| | BA52P | DGVYFASTEKSNIIRGWIFGTTLDSKTQSLLIVNNATNVVIKVCEFQFCNDPFLDVYYHKNNKSWMESEFRVYSSANNCTFE |
| | | YVSQPFLMDLEGKQGNFKNLREFVFKNIDGYFKIYSKHTPINLGRDLPQGFSALEPLVDLPIGINITRFQTLLALHRSYLTPGD |
| | | SSSGWTAGAAAYYVGYLQPRTFLLKYNENGTITDAVDCALDPLSETKCTLKSFTVEKGIYQTSNFRVQPTESIVRFPNITNLC |
| | | PFDEVFNATRFASVYAWNRKRISNCVADYSVLYNFAPFFAFKCYGVSPTKLNDLCFTNVYADSFVIRGNEVSQIAPGQTGNI |
| | | ADYNYKLPDDFTGCVIAWNSNNLDSKVGGNYNYRYRLFRKSNLKPFERDISTEIYQAGNKPCNGVAGVNCYFPLQSYGFR |
| | | PTYGVGHQPYRVVVLSFELLHAPATVCGPKKSTNLVKNKCVNFNFNGLTGTGVLTESNKKFLPFQQFGRDIADTTDAVRDP |
| | | QTLEILDITPCSFGGVSVITPGTNTSNQVAVLYQGVNCTEVPVAIHADQLTPTWRVYSTGSNVFQTRAGCLIGAEYVNNSYE |
| | | CDIPIGAGICASYQTQTKSHRRARSVASQSIIAYTMSLGAENSVAYSNNSIAIPTNFTISVTTEILPVSMTKTSVDCTMYICGDS |
| | | TECSNLLLQYGSFCTQLKRALTGIAVEQDKNTQEVFAQVKQIYKTPPIKYFGGFNFSQILPDPSKPSKRSFIEDLLFNKVTLAD |
| | | AGFIKQYGDCLGDIAARDLICAQKFNGLTVLPPLLTDEMIAQYTSALLAGTITSGWTFGAGAALQIPFAMQMAYRFNGIGVTQ |
| | | NVLYENQKLIANQFNSAIGKIQDSLSSTASALGKLQDVVNHNAQALNTLVKQLSSKFGAISSVLNDILSRLDPPEAEVQIDRLI |
| | | TGRLQSLQTYVTQQLIRAAEIRASANLAATKMSECVLGQSKRVDFCGKGYHLMSFPQSAPHGVVFLHVTYVPAQEKNFTTA |
| | | PAICHDGKAHFPREGVFVSNGTHWFVTQRNFYEPQIITTDNTFVSGNCDVVIGIVNNTVYDPLQPELDSFKEELDKYFKNHT |
| | | SPDVDLGDISGINASVVNIQKEIDRLNEVAKNLNESLIDLQELGKYEQYIKWPWYIWLGFIAGLIAIVMVTIMLCCMTSCCSCLK |
| | | GCCSCGSCCKFDEDDSEPVLKGVKLHYT |
| 285 | Spike- | MFVFLVLLPLVSSQCVNLTTRTQLPPAYTNSFTRGVYYPDKVFRSSVLHSTQDLFLPFFSNVTWFHAIHVSGTNGTKRFDN |
| | HexaP | PVLPFNDGVYFASTEKSNIIRGWIFGTTLDSKTQSLLIVNNATNVVIKVCEFQFCNDPFLGVYYHKNNKSWMESEFRVYSSA |
| | | NNCTFEYVSQPFLMDLEGKQGNFKNLREFVFKNIDGYFKIYSKHTPINLVRDLPQGFSALEPLVDLPIGINITRFQTLLALHRS |
| | | YLTPGDSSSGWTAGAAAYYVGYLQPRTFLLKYNENGTITDAVDCALDPLSETKCTLKSFTVEKGIYQTSNFRVQPTESIVRF |
| | | PNITNLCPFGEVFNATRFASVYAWNRKRISNCVADYSVLYNSASFSTFKCYGVSPTKLNDLCFTNVYADSFVIRGDEVRQIA |
| | | PGQTGKIADYNYKLPDDFTGCVIAWNSNNLDSKVGGNYNYLYRLFRKSNLKPFERDISTEIYQAGSTPCNGVEGFNCYFPL |
| | | QSYGFQPTNGVGYQPYRVVVLSFELLHAPATVCGPKKSTNLVKNKCVNFNFNGLTGTGVLTESNKKFLPFQQFGRDIADTT |
| | | DAVRDPQTLEILDITPCSFGGVSVITPGTNTSNQVAVLYQDVNCTEVPVAIHADQLTPTWRVYSTGSNVFQTRAGCLIGAEH |
| | | VNNSYECDIPIGAGICASYQTQTNSPRRARSVASQSIIAYTMSLGAENSVAYSNNSIAIPTNFTISVTTEILPVSMTKTSVDCT |
| | | MYICGDSTECSNLLLQYGSFCTQLNRALTGIAVEQDKNTQEVFAQVKQIYKTPPIKDFGGFNFSQILPDPSKPSKRSPIEDLL |
| | | FNKVTLADAGFIKQYGDCLGDIAARDLICAQKFNGLTVLPPLLTDEMIAQYTSALLAGTITSGWTFGAGPALQIPFPMQMAYR |
| | | FNGIGVTQNVLYENQKLIANQFNSAIGKIQDSLSSTPSALGKLQDVVNQNAQALNTLVKQLSSNFGAISSVLNDILSRLDPPE |
| | | AEVQIDRLITGRLQSLQTYVTQQLIRAAEIRASANLAATKMSECVLGQSKRVDFCGKGYHLMSFPQSAPHGVVFLHVTYVPA |
| | | QEKNFTTAPAICHDGKAHFPREGVFVSNGTHWFVTQRNFYEPQIITTDNTFVSGNCDVVIGIVNNTVYDPLQPELDSFKEEL |
| | | DKYFKNHTSPDVDLGDISGINASVVNIQKEIDRLNEVAKNLNESLIDLQELGKYEQYIKWPWYIWLGFIAGLIAIVMVTIMLCC |
| | | MTSCCSCLKGCCSCGSCCKFDEDDSEPVLKGVKLHYT- |
| 286 | BA5-Spike- | MGVFLVLLPLVSSQCVNLITRTQSYTNSFTRGVYYPDKVFRSSVLHSTQDLFLPFFSNVTWFHAISGTNGIKRFDNPVLPFN |
| | HexaP | DGVYFASTEKSNIIRGWIFGTTLDSKTQSLLIVNNATNVVIKVCEFQFCNDPFLDVYYHKNNKSWMESEFRVYSSANNCTFE |
| | | YVSQPFLMDLEGKQGNFKNLREFVFKNIDGYFKIYSKHTPINLGRDLPQGFSALEPLVDLPIGINITRFQTLLALHRSYLTPGD |
| | | SSSGWTAGAAAYYVGYLQPRTFLLKYNENGTITDAVDCALDPLSETKCTLKSFTVEKGIYQTSNFRVQPTESIVRFPNITNLC |
| | | PFDEVFNATRFASVYAWNRKRISNCVADYSVLYNFAPFFAFKCYGVSPTKLNDLCFTNVYADSFVIRGNEVSQIAPGQTGNI |
| | | ADYNYKLPDDFTGCVIAWNSNNLDSKVGGNYNYRYRLFRKSNLKPFERDISTEIYQAGNKPCNGVAGVNCYFPLQSYGFR |
| | | PTYGVGHQPYRVVVLSFELLHAPATVCGPKKSTNLVKNKCVNFNFNGLTGTGVLTESNKKFLPFQQFGRDIADTTDAVRDP |
| | | QTLEILDITPCSFGGVSVITPGTNTSNQVAVLYQGVNCTEVPVAIHADQLTPTWRVYSTGSNVFQTRAGCLIGAEYVNNSYE |
| | | CDIPIGAGICASYQTQTKSHRRARSVASQSIIAYTMSLGAENSVAYSNNSIAIPTNFTISVTTEILPVSMTKTSVDCTMYICGDS |
| | | TECSNLLLQYGSFCTQLKRALTGIAVEQDKNTQEVFAQVKQIYKTPPIKYFGGFNFSQILPDPSKPSKRSPIEDLLFNKVTLA |
| | | DAGFIKQYGDCLGDIAARDLICAQKFNGLTVLPPLLTDEMIAQYTSALLAGTITSGWTFGAGPALQIPFPMQMAYRENGIGVT |
| | | QNVLYENQKLIANQFNSAIGKIQDSLSSTPSALGKLQDVVNHNAQALNTLVKQLSSKFGAISSVLNDILSRLDPPEAEVQIDRL |
| | | ITGRLQSLQTYVTQQLIRAAEIRASANLAATKMSECVLGQSKRVDFCGKGYHLMSFPQSAPHGVVFLHVTYVPAQEKNFTT |
| | | APAICHDGKAHFPREGVFVSNGTHWFVTQRNFYEPQIITTDNTFVSGNCDVVIGIVNNTVYDPLQPELDSFKEELDKYFKNH |
| | | TSPDVDLGDISGINASVVNIQKEIDRLNEVAKNLNESLIDLQELGKYEQYIKWPWYIWLGFIAGLIAIVMVTIMLCCMTSCCSCL |
| | | KGCCSCGSCCKFDEDDSEPVLKGVKLHYT- |
| 287 | Secretion | MGVTAPRTLILLLSGALALTETWAGSAVGACVLCNSQTSLRCGACIRRPFLCCKCCYDHVISTSHKLVLSVNPYVCNAPGC |
| | signal | DVTDVTQLYLGGMSYYCKSHKPPISFPLCANGQVFGLYKNTCVGSDNVTDFNAIATCDWTNAGDYILANTCTERLKLFAAE |
| | sequence | TLKATEETFKLSYGIATVREVLSDRELHLSWEVGKPRPPLNRNYVFTGYRVTKNSKVQIGEYTFEKGDYGDAVVYRGTTTY |
| | (under- | KLNVGDYFVLTSHTVMPLSAPTLVPQEHYVRITGLYPTLNISDEFSSNVANYQKVGMQKYSTLQGPPGTGKSHFAIGLALYY |
| | lined) | PSARIVYTACSHAAVDALCEKALKYLPIDKCSRIIPARARVECFDKFKVNSTLEQYVFCTVNALPETTADIVVFDEISMATNYD |
| | NSP13 | LSVVNARLRAKHYVYIGDPAQLPAPRTLLTKGTLEPEYFNSVCRLMKTIGPDMFLGTCRRCPAEIVDTVSALVYDNKLKAHK |
| | | DKSAQCFKMFYKGVITHDVSSAINRPQIGVVREFLTRNPAWRKAVFISPYNSQNAVASKILGLPTQTVDSSQGSEYDYVIFT |
| | | QTTETAHSCNVNRFNVAITRAKVGILCIMSDRDLYDKLQFTSLEIPRRNVATLQ |
| 288 | Secretion | MGVTAPRTLILLLSGALALTETWAGSSADAQSFLNRVCGVSAARLTPCGTGTSTDVVYRAFDIYNDKVAGFAKFLKTNCCR |
| | signal | FQEKDEDDNLIDSYFVVKRHTFSNYQHEETIYNLLKDCPAVAKHDFFKFRIDGDMVPHISRQRLTKYTMADLVYALRHFDEG |
| | sequence | NCDTLKEILVTYNCCDDDYFNKKDWYDFVENPDILRVYANLGERVRQALLKTVQFCDAMRNAGIVGVLTLDNQDLNGNWY |
| | (under- | DFGDFIQTTPGSGVPVVDSYYSLLMPILTLTRALTAESHVDTDLTKPYIKWDLLKYDFTEERLKLFDRYFKYWDQTYHPNCV |
| | lined) | NCLDDRCILHCANFNVLFSTVFPPTSFGPLVRKIFVDGVPFVVSTGYHFRELGVVHNQDVNLHSSRLSFKELLVYAADPAMH |
| | NSP12 | AASGNLLLDKRTTCFSVAALTNNVAFQTVKPGNFNKDFYDFAVSKGFFKEGSSVELKHFFFAQDGNAAISDYDYYRYNLPT |
| | | MCDIRQLLFVVEVVDKYFDCYDGGCINANQVIVNNLDKSAGFPFNKWGKARLYYDSMSYEDQDALFAYTKRNVIPTITQMN |
| | | LKYAISAKNRARTVAGVSICSTMTNRQFHQKLLKSIAATRGATVVIGTSKFYGGWHNMLKTVYSDVENPHLMGWDYPKCD |
| | | RAMPNMLRIMASLVLARKHTTCCSLSHRFYRLANECAQVLSEMVMCGGSLYVKPGGTSSGDATTAYANSVFNICQAVTAN |
| | | VNALLSTDGNKIADKYVRNLQHRLYECLYRNRDVDTDFVNEFYAYLRKHFSMMILSDDAVVCFNSTYASQGLVASIKNFKSV |
| | | LYYQNNVFMSEAKCWTETDLTKGPHEFCSQHTMLVKQGDDYVYLPYPDPSRILGAGCFVDDIVKTDGTLMIERFVSLAIDA |
| | | YPLTKHPNQEYADVFHLYLQYIRKLHDELTGHMLDMYSVMLTNDNTSRYWEPEFYEAMYTPHTVLQ |
| 289 | Secretion | MGVTAPRTLILLLSGALALTETWAGSSKMSDVKCTSVVLLSVLQQLRVESSSKLWAQCVQLHNDILLAKDTTEAFEKMVSLL |
| | signal | SVLLSMQGAVDINKLCEEMLDNRATLQ |
| | sequence | |
| | (under- | |
| | lined) | |
| | NSP7 | |
| 290 | Concatemer | MGAVGACVLCNSQTSLRCGACIRRPFLCCKCCYDHVISTSHKLVLSVNPYVCNAPGCDVTDVTQLYLGGMSYYCKSHKPP |
| | (NSP13-G4S- | ISFPLCANGQVFGLYKNTCVGSDNVTDFNAIATCDWTNAGDYILANTCTERLKLFAAETLKATEETFKLSYGIATVREVLSDR |
| | NSP12-G4S- | ELHLSWEVGKPRPPLNRNYVFTGYRVTKNSKVQIGEYTFEKGDYGDAVVYRGTTTYKLNVGDYFVLTSHTVMPLSAPTLVP |
| | NSP7) | QEHYVRITGLYPTLNISDEFSSNVANYQKVGMQKYSTLQGPPGTGKSHFAIGLALYYPSARIVYTACSHAAVDALCEKALKY |
| | | LPIDKCSRIIPARARVECFDKFKVNSTLEQYVFCTVNALPETTADIVVFDEISMATNYDLSVVNARLRAKHYVYIGDPAQLPAP |
| | | RTLLTKGTLEPEYFNSVCRLMKTIGPDMFLGTCRRCPAEIVDTVSALVYDNKLKAHKDKSAQCFKMFYKGVITHDVSSAINR |
| | | PQIGVVREFLTRNPAWRKAVFISPYNSQNAVASKILGLPTQTVDSSQGSEYDYVIFTQTTETAHSCNVNRFNVAITRAKVGIL |
| | | CIMSDRDLYDKLQFTSLEIPRRNVATLQGGGGSGGGGSSADAQSFLNRVCGVSAARLTPCGTGTSTDVVYRAFDIYNDKV |
| | | AGFAKFLKTNCCRFQEKDEDDNLIDSYFVVKRHTFSNYQHEETIYNLLKDCPAVAKHDFFKFRIDGDMVPHISRQRLTKYTM |
| | | ADLVYALRHFDEGNCDTLKEILVTYNCCDDDYFNKKDWYDFVENPDILRVYANLGERVRQALLKTVQFCDAMRNAGIVGVL |
| | | TLDNQDLNGNWYDFGDFIQTTPGSGVPVVDSYYSLLMPILTLTRALTAESHVDTDLTKPYIKWDLLKYDFTEERLKLFDRYF |
| | | KYWDQTYHPNCVNCLDDRCILHCANFNVLFSTVFPPTSFGPLVRKIFVDGVPFVVSTGYHFRELGVVHNQDVNLHSSRLSF |
| | | KELLVYAADPAMHAASGNLLLDKRTTCFSVAALTNNVAFQTVKPGNFNKDFYDFAVSKGFFKEGSSVELKHFFFAQDGNAA |
| | | ISDYDYYRYNLPTMCDIRQLLFVVEVVDKYFDCYDGGCINANQVIVNNLDKSAGFPFNKWGKARLYYDSMSYEDQDALFAY |
| | | TKRNVIPTITQMNLKYAISAKNRARTVAGVSICSTMTNRQFHQKLLKSIAATRGATVVIGTSKFYGGWHNMLKTVYSDVENP |
| | | HLMGWDYPKCDRAMPNMLRIMASLVLARKHTTCCSLSHRFYRLANECAQVLSEMVMCGGSLYVKPGGTSSGDATTAYAN |
| | | SVFNICQAVTANVNALLSTDGNKIADKYVRNLQHRLYECLYRNRDVDTDFVNEFYAYLRKHFSMMILSDDAVVCFNSTYAS |
| | | QGLVASIKNFKSVLYYQNNVFMSEAKCWTETDLTKGPHEFCSQHTMLVKQGDDYVYLPYPDPSRILGAGCFVDDIVKTDGT |
| | | LMIERFVSLAIDAYPLTKHPNQEYADVFHLYLQYIRKLHDELTGHMLDMYSVMLTNDNTSRYWEPEFYEAMYTPHTVLQGG |
| | | GGSGGGGSSKMSDVKCTSVVLLSVLQQLRVESSSKLWAQCVQLHNDILLAKDTTEAFEKMVSLLSVLLSMQGAVDINKLC |
| | | EEMLDNRATLQ |
| 291 | Concatemer | MGAVGACVLCNSQTSLRCGACIRRPFLCCKCCYDHVISTSHKLVLSVNPYVCNAPGCDVTDVTQLYLGGMSYYCKSHKPP |
| | (NSP13- | ISFPLCANGQVFGLYKNTCVGSDNVTDFNAIATCDWTNAGDYILANTCTERLKLFAAETLKATEETFKLSYGIATVREVLSDR |
| | G4furG4S- | ELHLSWEVGKPRPPLNRNYVFTGYRVTKNSKVQIGEYTFEKGDYGDAVVYRGTTTYKLNVGDYFVLTSHTVMPLSAPTLVP |
| | NSP12- | QEHYVRITGLYPTLNISDEFSSNVANYQKVGMQKYSTLQGPPGTGKSHFAIGLALYYPSARIVYTACSHAAVDALCEKALKY |
| | G4furG4S- | LPIDKCSRIIPARARVECFDKFKVNSTLEQYVFCTVNALPETTADIVVFDEISMATNYDLSVVNARLRAKHYVYIGDPAQLPAP |
| | NSP7) | RTLLTKGTLEPEYFNSVCRLMKTIGPDMFLGTCRRCPAEIVDTVSALVYDNKLKAHKDKSAQCFKMFYKGVITHDVSSAINR |
| | | PQIGVVREFLTRNPAWRKAVFISPYNSQNAVASKILGLPTQTVDSSQGSEYDYVIFTQTTETAHSCNVNRFNVAITRAKVGIL |
| | | CIMSDRDLYDKLQFTSLEIPRRNVATLQGGGGRSKRSGGGGSSADAQSFLNRVCGVSAARLTPCGTGTSTDVVYRAFDIY |
| | | NDKVAGFAKFLKTNCCRFQEKDEDDNLIDSYFVVKRHTFSNYQHEETIYNLLKDCPAVAKHDFFKFRIDGDMVPHISRQRLT |
| | | KYTMADLVYALRHFDEGNCDTLKEILVTYNCCDDDYFNKKDWYDFVENPDILRVYANLGERVRQALLKTVQFCDAMRNAGI |
| | | VGVLTLDNQDLNGNWYDFGDFIQTTPGSGVPVVDSYYSLLMPILTLTRALTAESHVDTDLTKPYIKWDLLKYDFTEERLKLF |
| | | DRYFKYWDQTYHPNCVNCLDDRCILHCANFNVLFSTVFPPTSFGPLVRKIFVDGVPFVVSTGYHFRELGVVHNQDVNLHSS |
| | | RLSFKELLVYAADPAMHAASGNLLLDKRTTCFSVAALTNNVAFQTVKPGNFNKDFYDFAVSKGFFKEGSSVELKHFFFAQD |
| | | GNAAISDYDYYRYNLPTMCDIRQLLFVVEVVDKYFDCYDGGCINANQVIVNNLDKSAGFPFNKWGKARLYYDSMSYEDQD |
| | | ALFAYTKRNVIPTITQMNLKYAISAKNRARTVAGVSICSTMTNRQFHQKLLKSIAATRGATVVIGTSKFYGGWHNMLKTVYSD |
| | | VENPHLMGWDYPKCDRAMPNMLRIMASLVLARKHTTCCSLSHRFYRLANECAQVLSEMVMCGGSLYVKPGGTSSGDATT |
| | | AYANSVFNICQAVTANVNALLSTDGNKIADKYVRNLQHRLYECLYRNRDVDTDFVNEFYAYLRKHFSMMILSDDAVVCFNS |
| | | TYASQGLVASIKNFKSVLYYQNNVFMSEAKCWTETDLTKGPHEFCSQHTMLVKQGDDYVYLPYPDPSRILGAGCFVDDIVK |
| | | TDGTLMIERFVSLAIDAYPLTKHPNQEYADVFHLYLQYIRKLHDELTGHMLDMYSVMLTNDNTSRYWEPEFYEAMYTPHTV |
| | | LQGGGGRSKRSGGGGSSKMSDVKCTSVVLLSVLQQLRVESSSKLWAQCVQLHNDILLAKDTTEAFEKMVSLLSVLLSMQ |
| | | GAVDINKLCEEMLDNRATLQ |
| 292 | Omicron- | ATGGGCGTTTTTCTTGTTTTATTGCCACTAGTCTCTAGTCAGTGTGTTAATCTTATAACCAGAACTCAATCATACACTAA |
| | BA52P | TTCTTTCACACGTGGTGTTTATTACCCTGACAAAGTTTTCAGATCCTCAGTTTTACATTCAACTCAGGACTTGTTCTTAC |
| | | CTTTCTTTTCCAATGTTACTTGGTTCCATGCTATCTCTGGGACCAATGGTATCAAGAGGTTTGATAACCCTGTCCTACC |
| | | ATTTAATGATGGTGTTTATTTTGCTTCCACTGAGAAGTCTAACATAATAAGAGGCTGGATTTTTGGTACTACTTTAGATT |
| | | CGAAGACCCAGTCCCTACTTATTGTTAATAACGCTACTAATGTTGTTATTAAAGTCTGTGAATTTCAATTTTGTAATGAT |
| | | CCATTTTTGGATGTTTATTACCACAAAAACAACAAAAGTTGGATGGAAAGTGAGTTCAGAGTTTATTCTAGTGCGAATA |
| | | ATTGCACTTTTGAATATGTCTCTCAGCCTTTTCTTATGGACCTTGAAGGAAAACAGGGTAATTTCAAAAATCTTAGGGAA |
| | | TTTGTGTTTAAGAATATTGATGGTTATTTTAAAATATATTCTAAGCACACGCCTATTAATTTAGGGCGTGATCTCCCTCA |
| | | GGGTTTTTCGGCTTTAGAACCATTGGTAGATTTGCCAATAGGTATTAACATCACTAGGTTTCAAACTTTACTTGCTTTAC |
| | | ATAGAAGTTATTTGACTCCTGGTGATTCTTCTTCAGGTTGGACAGCTGGTGCTGCAGCTTATTATGTGGGTTATCTTCA |
| | | ACCTAGGACTTTTCTATTAAAATATAATGAAAATGGAACCATTACAGATGCTGTAGACTGTGCACTTGACCCTCTCTCA |
| | | GAAACAAAGTGTACGTTGAAATCCTTCACTGTAGAAAAAGGAATCTATCAAACTTCTAACTTTAGAGTCCAACCAACAG |
| | | AATCTATTGTTAGATTTCCTAATATTACAAACTTGTGCCCTTTTGATGAAGTTTTTAACGCCACCAGATTTGCATCCGTG |
| | | TATGCTTGGAACAGGAAGAGAATCAGCAACTGTGTTGCTGATTATTCTGTCCTATATAATTTCGCACCATTTTTCGCTTT |
| | | TAAGTGTTATGGAGTGTCTCCTACTAAATTAAATGATCTCTGCTTTACTAATGTCTATGCAGATTCATTTGTAATTAGAG |
| | | GTAATGAAGTCAGCCAAATCGCTCCAGGGCAAACTGGAAATATTGCTGATTATAATTATAAATTACCAGATGATTTTAC |
| | | AGGCTGCGTTATAGCTTGGAATTCTAACAACCTTGATTCTAAGGTTGGTGGTAATTATAATTACCGGTATAGATTGTTTA |
| | | GGAAGTCTAATCTCAAACCTTTTGAGAGAGATATTTCAACTGAAATCTATCAGGCCGGTAACAAACCTTGTAATGGTGT |
| | | TGCAGGTGTTAATTGTTACTTTCCTTTACAATCATATGGTTTCCGACCCACTTATGGTGTTGGTCACCAACCATACAGA |
| | | GTAGTAGTACTTTCTTTTGAACTTCTACATGCACCAGCAACTGTTTGTGGACCTAAAAAGTCTACTAATTTGGTTAAAAA |
| | | CAAATGTGTCAATTTCAACTTCAATGGTTTAACAGGCACAGGTGTTCTTACTGAGTCTAACAAAAAGTTTCTGCCTTTCC |
| | | AACAATTTGGCAGAGACATTGCTGACACTACTGATGCTGTCCGTGATCCACAGACACTTGAGATTCTTGACATTACAC |
| | | CATGTTCTTTTGGTGGTGTCAGTGTTATAACACCAGGAACAAATACTTCTAACCAGGTTGCTGTTCTTTATCAGGGTGT |
| | | TAACTGCACAGAAGTCCCTGTTGCTATTCATGCAGATCAACTTACTCCTACTTGGCGTGTTTATTCTACAGGTTCTAAT |
| | | GTTTTTCAAACACGTGCAGGCTGTTTAATAGGGGCTGAATATGTCAACAACTCATATGAGTGTGACATACCCATTGGTG |
| | | CAGGTATATGCGCTAGTTATCAGACTCAGACTAAGTCTCATCGGCGGGCACGTAGTGTAGCTAGTCAATCCATCATTG |
| | | CCTACACTATGTCACTTGGTGCAGAAAATTCAGTTGCTTACTCTAATAACTCTATTGCCATACCCACAAATTTTACTATT |
| | | AGTGTTACCACAGAAATTCTACCAGTGTCTATGACCAAGACATCAGTAGATTGTACAATGTACATTTGTGGTGATTCAA |
| | | CTGAATGCAGCAATCTTTTGTTGCAATATGGCAGTTTTTGTACACAATTAAAACGTGCTTTAACTGGAATAGCTGTTGAA |
| | | CAAGACAAAAACACCCAAGAAGTTTTTGCACAAGTCAAACAAATTTACAAAACACCACCAATTAAATATTTTGGTGGTTT |
| | | TAATTTTTCACAAATATTACCAGATCCATCAAAACCAAGCAAGAGGTCATTTATTGAAGATCTACTTTTCAACAAAGTGA |
| | | CACTTGCAGATGCTGGCTTCATCAAACAATATGGTGATTGCCTTGGTGATATTGCTGCTAGAGACCTCATTTGTGCACA |
| | | AAAGTTTAACGGCCTTACTGTTTTGCCACCTTTGCTCACAGATGAAATGATTGCTCAATACACTTCTGCACTGTTAGCG |
| | | GGTACAATCACTTCTGGTTGGACCTTTGGTGCAGGTGCTGCATTACAAATACCATTTGCTATGCAAATGGCTTATAGGT |
| | | TTAATGGTATTGGAGTTACACAGAATGTTCTCTATGAGAACCAAAAATTGATTGCCAACCAATTTAATAGTGCTATTGGC |
| | | AAAATTCAAGACTCACTTTCTTCCACAGCAAGTGCACTTGGAAAACTTCAAGATGTGGTCAACCATAATGCACAAGCTT |
| | | TAAACACGCTTGTTAAACAACTTAGCTCCAAATTTGGTGCAATTTCAAGTGTTTTAAATGATATCCTTTCACGTCTTGAC |
| | | CCTCCCGAGGCTGAAGTGCAAATTGATAGGTTGATCACAGGCAGACTTCAAAGTTTGCAGACATATGTGACTCAACAA |
| | | TTAATTAGAGCTGCAGAAATCAGAGCTTCTGCTAATCTTGCTGCTACTAAAATGTCAGAGTGTGTACTTGGACAATCAA |
| | | AAAGAGTTGATTTTTGTGGAAAGGGCTATCATCTTATGTCCTTCCCTCAGTCAGCACCTCATGGTGTAGTCTTCTTGCA |
| | | TGTGACTTATGTCCCTGCACAAGAAAAGAACTTCACAACTGCTCCTGCCATTTGTCATGATGGAAAAGCACACTTTCCT |
| | | CGTGAAGGTGTCTTTGTTTCAAATGGCACACACTGGTTTGTAACACAAAGGAATTTTTATGAACCACAAATCATTACTA |
| | | CAGACAACACATTTGTGTCTGGTAACTGTGATGTTGTAATAGGAATTGTCAACAACACAGTTTATGATCCTTTGCAACC |
| | | TGAATTAGATTCATTCAAGGAGGAGTTAGATAAATATTTTAAGAATCATACATCACCAGATGTTGATTTAGGTGACATCT |
| | | CTGGCATTAATGCTTCAGTTGTAAACATTCAAAAAGAAATTGACCGCCTCAATGAGGTTGCCAAGAATTTAAATGAATC |
| | | TCTCATCGATCTCCAAGAACTTGGAAAGTATGAGCAGTATATAAAATGGCCATGGTACATTTGGCTAGGTTTTATAGCT |
| | | GGCTTGATTGCCATAGTAATGGTGACAATTATGCTTTGCTGTATGACCAGTTGCTGTAGTTGTCTCAAGGGCTGTTGTT |
| | | CTTGTGGATCCTGCTGCAAATTTGATGAAGACGACTCTGAGCCAGTGCTCAAAGGAGTCAAATTACATTACACA |
| 293 | Omicron- | ATGGGCGTTTTTCTTGTTTTATTGCCACTAGTCTCTAGTCAGTGTGTTAATCTTATCACCAGAACTCAAAGCTACACTAA |
| | BA52P | TTCTTTCACACGTGGTGTTTATTACCCTGACAAAGTTTTCAGATCCTCAGTTTTACATTCAACTCAGGATTTGTTCTTAC |
| | | CTTTCTTTTCCAATGTTACTTGGTTCCATGCTATATCTGGGACCAATGGTATCAAGAGGTTTGATAACCCTGTCCTACC |
| | | ATTTAATGATGGTGTTTATTTTGCTTCCACTGAGAAGTCTAACATAATAAGAGGCTGGATCTTTGGTACTACTTTAGATT |
| | | CGAAGACCCAGTCCCTACTTATTGTTAATAACGCTACTAATGTTGTTATTAAAGTCTGTGAATTTCAATTTTGTAATGAT |
| | | CCATTTTTGGACGTTTATTACCACAAAAACAACAAAAGTTGGATGGAAAGTGAGTTCAGAGTTTATTCTAGTGCGAATA |
| | | ATTGCACTTTTGAATATGTCTCTCAGCCTTTTCTTATGGACCTTGAAGGAAAACAGGGTAATTTCAAAAATCTTAGGGAA |
| | | TTTGTGTTTAAGAATATTGATGGTTATTTTAAAATATATTCTAAGCACACGCCTATTAATTTAGGCCGTGATCTCCCTCA |
| | | GGGTTTTTCGGCTTTAGAACCATTGGTAGATTTGCCAATAGGTATTAACATCACTAGGTTTCAAACTTTACTTGCTTTAC |
| | | ATAGAAGTTATTTGACTCCTGGTGATTCTTCTTCAGGTTGGACAGCTGGTGCTGCAGCTTATTATGTGGGTTATCTTCA |
| | | ACCTAGGACTTTTCTATTAAAATATAATGAAAATGGAACCATTACAGATGCTGTAGACTGTGCACTTGACCCTCTCTCA |
| | | GAAACAAAGTGTACGTTGAAATCCTTCACTGTAGAAAAAGGAATCTATCAAACTTCTAACTTTAGAGTCCAACCAACAG |
| | | AATCTATTGTTAGATTTCCTAATATTACAAACTTGTGCCCTTTTGACGAAGTTTTTAACGCCACCAGATTTGCATCCGTG |
| | | TATGCTTGGAACAGGAAGAGAATCAGCAACTGTGTTGCTGATTATTCTGTCCTATATAATTTCGCACCCTTTTTCGCCT |
| | | TTAAGTGTTATGGAGTGTCTCCTACTAAATTAAATGATCTCTGCTTTACTAATGTCTATGCAGATTCATTTGTAATTAGA |
| | | GGTAACGAAGTCAGCCAAATCGCTCCAGGGCAAACTGGAAATATTGCTGATTATAATTATAAATTACCAGATGATTTTA |
| | | CAGGCTGCGTTATAGCTTGGAATTCTAACAATCTTGATTCTAAGGTTGGTGGTAATTATAATTACCGGTATAGATTGTTT |
| | | AGGAAGTCTAATCTCAAACCTTTTGAGAGAGATATTTCAACTGAAATCTATCAGGCCGGTAACAAGCCTTGTAATGGTG |
| | | TTGCCGGTGTGAATTGTTACTTTCCTTTACAATCATATGGTTTCCGGCCCACTTACGGTGTTGGTCACCAACCATACAG |
| | | AGTAGTAGTACTTTCTTTTGAACTTCTACATGCACCAGCAACTGTTTGTGGACCTAAAAAGTCTACTAATTTGGTTAAAA |
| | | ACAAATGTGTCAATTTCAACTTCAATGGTTTAACAGGCACAGGTGTTCTTACTGAGTCTAACAAAAAGTTTCTGCCTTTC |
| | | CAACAATTTGGCAGAGACATTGCTGACACTACTGATGCTGTCCGTGATCCACAGACACTTGAGATTCTTGACATTACA |
| | | CCATGTTCTTTTGGTGGTGTCAGTGTTATAACACCAGGAACAAATACTTCTAACCAGGTTGCTGTTCTTTATCAGGGCG |
| | | TTAACTGCACAGAAGTCCCTGTTGCTATTCATGCAGATCAACTTACTCCTACTTGGCGTGTTTATTCTACAGGTTCTAAT |
| | | GTTTTTCAAACACGTGCAGGCTGTTTAATAGGGGCTGAATACGTCAACAACTCATATGAGTGTGACATACCCATTGGT |
| | | GCAGGTATATGCGCTAGTTATCAGACTCAGACTAAGTCTCACCGGGGGGCACGTAGTGTAGCTAGTCAATCCATCATT |
| | | GCCTACACTATGTCACTTGGTGCAGAAAATTCAGTTGCTTACTCTAATAACTCTATTGCCATACCCACAAATTTTACTAT |
| | | TAGCGTGACCACTGAAATCCTCCCCGTGAGCATGACCAAGACCAGCGTGGACTGCACCATGTACATCTGCGGCGACA |
| | | GCACCGAGTGCAGCAACCTGCTCCTGCAGTACGGCAGCTTCTGCACCCAGCTGAAGCGTGCTTTAACTGGGATAGCT |
| | | GTTGAACAAGACAAAAACACCCAAGAAGTTTTTGCACAAGTCAAACAAATTTACAAAACACCACCAATTAAATACTTTG |
| | | GTGGTTTTAATTTTTCACAAATATTACCAGATCCATCAAAACCAAGCAAGAGGTCATTTATTGAAGATCTACTTTTCAAC |
| | | AAAGTGACACTTGCAGATGCTGGCTTCATCAAACAATATGGTGATTGCCTTGGTGATATTGCTGCTAGGGACCTCATTT |
| | | GTGCACAAAAGTTTAACGGCCTTACTGTTTTGCCACCTTTGCTCACAGATGAAATGATTGCTCAATACACTTCTGCACT |
| | | GTTAGCGGGTACAATCACTTCTGGTTGGACCTTTGGTGCAGGTGCTGCATTACAAATACCATTTGCTATGCAAATGGC |
| | | TTATAGGTTTAATGGTATTGGAGTTACACAGAATGTTCTCTATGAGAACCAAAAATTGATTGCCAACCAATTTAATAGTG |
| | | CCATTGGCAAAATTCAAGACTCACTTTCTTCCACAGCAAGTGCACTTGGAAAACTTCAAGATGTGGTCAACCACAATGC |
| | | ACAAGCTTTAAACACGCTTGTTAAACAACTTAGCTCCAAGTTTGGTGCAATTTCAAGTGTTTTAAATGATATCCTTTCAC |
| | | GTCTTGACCCTCCCGAGGCTGAAGTGCAAATTGATAGGTTGATCACAGGCAGACTTCAAAGTTTGCAGACATATGTGA |
| | | CTCAACAATTAATTAGAGCTGCAGAAATCAGAGCTTCTGCTAATCTTGCTGCTACTAAAATGTCAGAGTGTGTACTTGG |
| | | ACAATCAAAAAGAGTTGATTTTTGTGGAAAGGGCTATCATCTTATGTCCTTCCCTCAGTCAGCACCTCATGGTGTAGTC |
| | | TTCTTGCATGTGACTTATGTCCCTGCACAAGAAAAGAACTTCACAACTGCTCCTGCCATTTGTCATGATGGAAAAGCAC |
| | | ACTTTCCTCGTGAAGGTGTCTTTGTTTCAAATGGCACACACTGGTTTGTAACACAAAGGAATTTTTATGAACCACAAAT |
| | | CATTACTACAGACAACACATTTGTGTCTGGTAACTGTGATGTTGTAATAGGAATTGTCAACAACACAGTTTATGATCCTT |
| | | TGCAACCTGAATTAGACTCATTCAAGGAGGAGTTAGATAAATATTTTAAGAATCATACATCACCAGATGTTGATTTAGGT |
| | | GACATCTCTGGCATTAATGCTTCAGTTGTAAACATTCAAAAAGAAATTGACCGCCTCAATGAGGTTGCCAAGAATTTAA |
| | | ATGAATCTCTCATCGATCTCCAAGAACTTGGAAAGTATGAGCAGTATATAAAATGGCCATGGTACATTTGGCTAGGTTT |
| | | TATAGCTGGCTTGATTGCCATAGTAATGGTGACAATTATGCTTTGCTGTATGACCAGTTGCTGTAGTTGTCTCAAGGGC |
| | | TGTTGTTCTTGTGGATCCTGCTGCAAATTTGATGAAGACGACTCTGAGCCAGTGCTCAAAGGAGTCAAATTACATTACA |
| | | CA |
| 294 | Spike-_ | ATGTTTGTTTTTCTTGTTTTATTGCCACTAGTCTCTAGTCAGTGTGTTAATCTTACAACCAGAACTCAATTACCCCCTGC |
| | HexaP | ATACACTAATTCTTTCACACGTGGTGTTTATTACCCTGACAAAGTTTTCAGATCCTCAGTTTTACATTCAACTCAGGATT |
| | | TGTTCTTACCTTTCTTTTCCAATGTTACTTGGTTCCATGCTATACATGTCTCTGGGACCAATGGTACTAAGAGGTTTGAT |
| | | AACCCTGTCCTACCATTTAATGATGGTGTTTATTTTGCTTCCACTGAGAAGTCTAACATAATAAGAGGCTGGATCTTTG |
| | | GTACTACTTTAGATTCGAAGACCCAGTCCCTACTTATTGTTAATAACGCTACTAATGTTGTTATTAAAGTCTGTGAATTT |
| | | CAATTTTGTAATGATCCATTTTTGGGTGTTTATTACCACAAAAACAACAAAAGTTGGATGGAAAGTGAGTTCAGAGTTTA |
| | | TTCTAGTGCGAATAATTGCACTTTTGAATATGTCTCTCAGCCTTTTCTTATGGACCTTGAAGGAAAACAGGGTAATTTCA |
| | | AAAATCTTAGGGAATTTGTGTTTAAGAATATTGATGGTTATTTTAAAATATATTCTAAGCACACGCCTATTAATTTAGTGC |
| | | GTGATCTCCCTCAGGGTTTTTCGGCTTTAGAACCATTGGTAGATTTGCCAATAGGTATTAACATCACTAGGTTTCAAAC |
| | | TTTACTTGCTTTACATAGAAGTTATTTGACTCCTGGTGATTCTTCTTCAGGTTGGACAGCTGGTGCTGCAGCTTATTAT |
| | | GTGGGTTATCTTCAACCTAGGACTTTTCTATTAAAATATAATGAAAATGGAACCATTACAGATGCTGTAGACTGTGCAC |
| | | TTGACCCTCTCTCAGAAACAAAGTGTACGTTGAAATCCTTCACTGTAGAAAAAGGAATCTATCAAACTTCTAACTTTAGA |
| | | GTCCAACCAACAGAATCTATTGTTAGATTTCCTAATATTACAAACTTGTGCCCTTTTGGTGAAGTTTTTAACGCCACCAG |
| | | ATTTGCATCCGTGTATGCTTGGAACAGGAAGAGAATCAGCAACTGTGTTGCTGATTATTCTGTCCTATATAATTCCGCA |
| | | TCATTTTCCACTTTTAAGTGTTATGGAGTGTCTCCTACTAAATTAAATGATCTCTGCTTTACTAATGTCTATGCAGATTCA |
| | | TTTGTAATTAGAGGTGATGAAGTCAGACAAATCGCTCCAGGGCAAACTGGAAAGATTGCTGATTATAATTATAAATTAC |
| | | CAGATGATTTTACAGGCTGCGTTATAGCTTGGAATTCTAACAATCTTGATTCTAAGGTTGGTGGTAATTATAATTACCTG |
| | | TATAGATTGTTTAGGAAGTCTAATCTCAAACCTTTTGAGAGAGATATTTCAACTGAAATCTATCAGGCCGGTAGCACAC |
| | | CTTGTAATGGTGTTGAAGGTTTTAATTGTTACTTTCCTTTACAATCATATGGTTTCCAACCCACTAATGGTGTTGGTTAC |
| | | CAACCATACAGAGTAGTAGTACTTTCTTTTGAACTTCTACATGCACCAGCAACTGTTTGTGGACCTAAAAAGTCTACTA |
| | | ATTTGGTTAAAAACAAATGTGTCAATTTCAACTTCAATGGTTTAACAGGCACAGGTGTTCTTACTGAGTCTAACAAAAAG |
| | | TTTCTGCCTTTCCAACAATTTGGCAGAGACATTGCTGACACTACTGATGCTGTCCGTGATCCACAGACACTTGAGATTC |
| | | TTGACATTACACCATGTTCTTTTGGTGGTGTCAGTGTTATAACACCAGGAACAAATACTTCTAACCAGGTTGCTGTTCT |
| | | TTATCAGGATGTTAACTGCACAGAAGTCCCTGTTGCTATTCATGCAGATCAACTTACTCCTACTTGGCGTGTTTATTCT |
| | | ACAGGTTCTAATGTTTTTCAAACACGTGCAGGCTGTTTAATAGGGGCTGAACATGTCAACAACTCATATGAGTGTGACA |
| | | TACCCATTGGTGCAGGTATATGCGCTAGTTATCAGACTCAGACTAATTCTCCTCGGCGGGCACGTAGTGTAGCTAGTC |
| | | AATCCATCATTGCCTACACTATGTCACTTGGTGCAGAAAATTCAGTTGCTTACTCTAATAACTCTATTGCCATACCCACA |
| | | AATTTTACTATTAGTGTTACCACAGAAATTCTACCAGTGTCTATGACCAAGACATCAGTAGATTGTACAATGTACATTTG |
| | | TGGTGATTCAACTGAATGCAGCAATCTTTTGTTGCAATATGGCAGTTTTTGTACACAATTAAACCGTGCTTTAACTGGG |
| | | ATAGCTGTTGAACAAGACAAAAACACCCAAGAAGTTTTTGCACAAGTCAAACAAATTTACAAAACACCACCAATTAAAG |
| | | ATTTTGGTGGTTTTAATTTTTCACAAATATTACCAGATCCATCAAAACCAAGCAAGAGGTCACCTATTGAAGATCTACTT |
| | | TTCAACAAAGTGACACTTGCAGATGCTGGCTTCATCAAACAATATGGTGATTGCCTTGGTGATATTGCTGCTAGGGAC |
| | | CTCATTTGTGCACAAAAGTTTAACGGCCTTACTGTTTTGCCACCTTTGCTCACAGATGAAATGATTGCTCAATACACTT |
| | | CTGCACTGTTAGCGGGTACAATCACTTCTGGTTGGACCTTTGGTGCAGGTCCTGCATTACAAATACCATTTCCTATGC |
| | | AAATGGCTTATAGGTTTAATGGTATTGGAGTTACACAGAATGTTCTCTATGAGAACCAAAAATTGATTGCCAACCAATTT |
| | | AATAGTGCCATTGGCAAAATTCAAGACTCACTTTCTTCCACACCTAGTGCACTTGGAAAACTTCAAGATGTGGTCAACC |
| | | AAAATGCACAAGCTTTAAACACGCTTGTTAAACAACTTAGCTCCAATTTTGGTGCAATTTCAAGTGTTTTAAATGATATC |
| | | CTTTCACGTCTTGACCCTCCCGAGGCTGAAGTGCAAATTGATAGGTTGATCACAGGCAGACTTCAAAGTTTGCAGACA |
| | | TATGTGACTCAACAATTAATTAGAGCTGCAGAAATCAGAGCTTCTGCTAATCTTGCTGCTACTAAAATGTCAGAGTGTG |
| | | TACTTGGACAATCAAAAAGAGTTGATTTTTGTGGAAAGGGCTATCATCTTATGTCCTTCCCTCAGTCAGCACCTCATGG |
| | | TGTAGTCTTCTTGCATGTGACTTATGTCCCTGCACAAGAAAAGAACTTCACAACTGCTCCTGCCATTTGTCATGATGGA |
| | | AAAGCACACTTTCCTCGTGAAGGTGTCTTTGTTTCAAATGGCACACACTGGTTTGTAACACAAAGGAATTTTTATGAAC |
| | | CACAAATCATTACTACAGACAACACATTTGTGTCTGGTAACTGTGATGTTGTAATAGGAATTGTCAACAACACAGTTTAT |
| | | GATCCTTTGCAACCTGAATTAGACTCATTCAAGGAGGAGTTAGATAAATATTTTAAGAATCATACATCACCAGATGTTG |
| | | ATTTAGGTGACATCTCTGGCATTAATGCTTCAGTTGTAAACATTCAAAAAGAAATTGACCGCCTCAATGAGGTTGCCAA |
| | | GAATTTAAATGAATCTCTCATCGATCTCCAAGAACTTGGAAAGTATGAGCAGTATATAAAATGGCCATGGTACATTTGG |
| | | CTAGGTTTTATAGCTGGCTTGATTGCCATAGTAATGGTGACAATTATGCTTTGCTGTATGACCAGTTGCTGTAGTTGTC |
| | | TCAAGGGCTGTTGTTCTTGTGGATCCTGCTGCAAATTTGATGAAGACGACTCTGAGCCAGTGCTCAAAGGAGTCAAAT |
| | | TACATTACACA |
| 295 | BA5-Spike- | ATGGGCGTTTTTCTTGTTTTATTGCCACTAGTCTCTAGTCAGTGTGTTAATCTTATCACCAGAACTCAAAGCTACACTAA |
| | HexaP | TTCTTTCACACGTGGTGTTTATTACCCTGACAAAGTTTTCAGATCCTCAGTTTTACATTCAACTCAGGATTTGTTCTTAC |
| | | CTTTCTTTTCCAATGTTACTTGGTTCCATGCTATATCTGGGACCAATGGTATCAAGAGGTTTGATAACCCTGTCCTACC |
| | | ATTTAATGATGGTGTTTATTTTGCTTCCACTGAGAAGTCTAACATAATAAGAGGCTGGATCTTTGGTACTACTTTAGATT |
| | | CGAAGACCCAGTCCCTACTTATTGTTAATAACGCTACTAATGTTGTTATTAAAGTCTGTGAATTTCAATTTTGTAATGAT |
| | | CCATTTTTGGACGTTTATTACCACAAAAACAACAAAAGTTGGATGGAAAGTGAGTTCAGAGTTTATTCTAGTGCGAATA |
| | | ATTGCACTTTTGAATATGTCTCTCAGCCTTTTCTTATGGACCTTGAAGGAAAACAGGGTAATTTCAAAAATCTTAGGGAA |
| | | TTTGTGTTTAAGAATATTGATGGTTATTTTAAAATATATTCTAAGCACACGCCTATTAATTTAGGCCGTGATCTCCCTCA |
| | | GGGTTTTTCGGCTTTAGAACCATTGGTAGATTTGCCAATAGGTATTAACATCACTAGGTTTCAAACTTTACTTGCTTTAC |
| | | ATAGAAGTTATTTGACTCCTGGTGATTCTTCTTCAGGTTGGACAGCTGGTGCTGCAGCTTATTATGTGGGTTATCTTCA |
| | | ACCTAGGACTTTTCTATTAAAATATAATGAAAATGGAACCATTACAGATGCTGTAGACTGTGCACTTGACCCTCTCTCA |
| | | GAAACAAAGTGTACGTTGAAATCCTTCACTGTAGAAAAAGGAATCTATCAAACTTCTAACTTTAGAGTCCAACCAACAG |
| | | AATCTATTGTTAGATTTCCTAATATTACAAACTTGTGCCCTTTTGACGAAGTTTTTAACGCCACCAGATTTGCATCCGTG |
| | | TATGCTTGGAACAGGAAGAGAATCAGCAACTGTGTTGCTGATTATTCTGTCCTATATAATTTCGCACCCTTTTTCGCCT |
| | | TTAAGTGTTATGGAGTGTCTCCTACTAAATTAAATGATCTCTGCTTTACTAATGTCTATGCAGATTCATTTGTAATTAGA |
| | | GGTAACGAAGTCAGCCAAATCGCTCCAGGGCAAACTGGAAATATTGCTGATTATAATTATAAATTACCAGATGATTTTA |
| | | CAGGCTGCGTTATAGCTTGGAATTCTAACAATCTTGATTCTAAGGTTGGTGGTAATTATAATTACCGGTATAGATTGTTT |
| | | AGGAAGTCTAATCTCAAACCTTTTGAGAGAGATATTTCAACTGAAATCTATCAGGCCGGTAACAAGCCTTGTAATGGTG |
| | | TTGCCGGTGTGAATTGTTACTTTCCTTTACAATCATATGGTTTCCGGCCCACTTACGGTGTTGGTCACCAACCATACAG |
| | | AGTAGTAGTACTTTCTTTTGAACTTCTACATGCACCAGCAACTGTTTGTGGACCTAAAAAGTCTACTAATTTGGTTAAAA |
| | | ACAAATGTGTCAATTTCAACTTCAATGGTTTAACAGGCACAGGTGTTCTTACTGAGTCTAACAAAAAGTTTCTGCCTTTC |
| | | CAACAATTTGGCAGAGACATTGCTGACACTACTGATGCTGTCCGTGATCCACAGACACTTGAGATTCTTGACATTACA |
| | | CCATGTTCTTTTGGTGGTGTCAGTGTTATAACACCAGGAACAAATACTTCTAACCAGGTTGCTGTTCTTTATCAGGGCG |
| | | TTAACTGCACAGAAGTCCCTGTTGCTATTCATGCAGATCAACTTACTCCTACTTGGCGTGTTTATTCTACAGGTTCTAAT |
| | | GTTTTTCAAACACGTGCAGGCTGTTTAATAGGGGCTGAATACGTCAACAACTCATATGAGTGTGACATACCCATTGGT |
| | | GCAGGTATATGCGCTAGTTATCAGACTCAGACTAAGTCTCACCGGCGGGCACGTAGTGTAGCTAGTCAATCCATCATT |
| | | GCCTACACTATGTCACTTGGTGCAGAAAATTCAGTTGCTTACTCTAATAACTCTATTGCCATACCCACAAATTTTACTAT |
| | | TAGCGTGACCACTGAAATCCTCCCCGTGAGCATGACCAAGACCAGCGTGGACTGCACCATGTACATCTGCGGCGACA |
| | | GCACCGAGTGCAGCAACCTGCTCCTGCAGTACGGCAGCTTCTGCACCCAGCTGAAGCGTGCTTTAACTGGGATAGCT |
| | | GTTGAACAAGACAAAAACACCCAAGAAGTTTTTGCACAAGTCAAACAAATTTACAAAACACCACCAATTAAATACTTTG |
| | | GTGGTTTTAATTTTTCACAAATATTACCAGATCCATCAAAACCAAGCAAGAGGTCACCTATTGAAGATCTACTTTTCAAC |
| | | AAAGTGACACTTGCAGATGCTGGCTTCATCAAACAATATGGTGATTGCCTTGGTGATATTGCTGCTAGGGACCTCATTT |
| | | GTGCACAAAAGTTTAACGGCCTTACTGTTTTGCCACCTTTGCTCACAGATGAAATGATTGCTCAATACACTTCTGCACT |
| | | GTTAGCGGGTACAATCACTTCTGGTTGGACCTTTGGTGCAGGTCCTGCATTACAAATACCATTTCCTATGCAAATGGC |
| | | TTATAGGTTTAATGGTATTGGAGTTACACAGAATGTTCTCTATGAGAACCAAAAATTGATTGCCAACCAATTTAATAGTG |
| | | CCATTGGCAAAATTCAAGACTCACTTTCTTCCACACCTAGTGCACTTGGAAAACTTCAAGATGTGGTCAACCACAATGC |
| | | ACAAGCTTTAAACACGCTTGTTAAACAACTTAGCTCCAAGTTTGGTGCAATTTCAAGTGTTTTAAATGATATCCTTTCAC |
| | | GTCTTGACCCTCCCGAGGCTGAAGTGCAAATTGATAGGTTGATCACAGGCAGACTTCAAAGTTTGCAGACATATGTGA |
| | | CTCAACAATTAATTAGAGCTGCAGAAATCAGAGCTTCTGCTAATCTTGCTGCTACTAAAATGTCAGAGTGTGTACTTGG |
| | | ACAATCAAAAAGAGTTGATTTTTGTGGAAAGGGCTATCATCTTATGTCCTTCCCTCAGTCAGCACCTCATGGTGTAGTC |
| | | TTCTTGCATGTGACTTATGTCCCTGCACAAGAAAAGAACTTCACAACTGCTCCTGCCATTTGTCATGATGGAAAAGCAC |
| | | ACTTTCCTCGTGAAGGTGTCTTTGTTTCAAATGGCACACACTGGTTTGTAACACAAAGGAATTTTTATGAACCACAAAT |
| | | CATTACTACAGACAACACATTTGTGTCTGGTAACTGTGATGTTGTAATAGGAATTGTCAACAACACAGTTTATGATCCTT |
| | | TGCAACCTGAATTAGACTCATTCAAGGAGGAGTTAGATAAATATTTTAAGAATCATACATCACCAGATGTTGATTTAGGT |
| | | GACATCTCTGGCATTAATGCTTCAGTTGTAAACATTCAAAAAGAAATTGACCGCCTCAATGAGGTTGCCAAGAATTTAA |
| | | ATGAATCTCTCATCGATCTCCAAGAACTTGGAAAGTATGAGCAGTATATAAAATGGCCATGGTACATTTGGCTAGGTTT |
| | | TATAGCTGGCTTGATTGCCATAGTAATGGTGACAATTATGCTTTGCTGTATGACCAGTTGCTGTAGTTGTCTCAAGGGC |
| | | TGTTGTTCTTGTGGATCCTGCTGCAAATTTGATGAAGACGACTCTGAGCCAGTGCTCAAAGGAGTCAAATTACATTACA |
| | | CA |
| 296 | Secretion | ATGGGCGTGACCGCCCCCCGGACCCTGATCCTGCTCCTGAGCGGCGCCCTGGCCCTGACCGAAACCTGGGCCGGC |
| | signal | AGCGCCGTGGGCGCCTGCGTGCTGTGTAACAGTCAGACCAGCCTGCGGTGCGGCGCCTGCATCCGCAGGCCCTTC |
| | sequence | CTGTGCTGTAAGTGCTGCTACGACCACGTGATTAGCACAAGCCACAAGCTCGTGCTCAGCGTGAACCCCTACGTGTG |
| | (under- | CAACGCCCCCGGCTGCGACGTGACAGACGTGACCCAGCTGTACCTGGGCGGAATGAGCTACTATTGTAAGAGTCAC |
| | lined) | AAGCCCCCTATCAGCTTCCCCCTGTGCGCCAACGGCCAGGTGTTCGGCCTGTACAAGAACACCTGCGTGGGCAGCG |
| | NSP13 | ACAACGTGACCGACTTCAACGCCATCGCCACCTGCGACTGGACCAACGCCGGCGACTACATCCTGGCCAACACCTG |
| | | CACCGAGCGGCTGAAGCTGTTCGCCGCTGAAACACTGAAGGCCACCGAGGAAACCTTCAAGCTGAGCTACGGCATC |
| | | GCCACCGTGCGGGAGGTGCTCAGCGATCGGGAACTGCACCTGAGCTGGGAGGTGGGCAAGCCCCGGCCTCCTCTG |
| | | AACCGGAACTACGTGTTCACCGGCTACCGGGTGACCAAGAACAGCAAGGTGCAGATCGGCGAGTACACCTTCGAGA |
| | | AGGGCGACTACGGCGACGCCGTGGTCTACCGGGGCACCACAACCTACAAGCTGAACGTGGGCGACTACTTCGTGCT |
| | | GACCAGCCACACCGTGATGCCCCTGAGCGCCCCCACCCTGGTGCCCCAGGAACACTACGTGCGGATCACCGGCCTG |
| | | TACCCCACCCTGAACATCAGCGACGAGTTCAGCTCTAACGTCGCCAACTACCAGAAAGTGGGAATGCAGAAGTATAG |
| | | CACACTGCAGGGCCCCCCAGGCACCGGCAAGAGCCACTTCGCCATCGGCCTGGCCCTGTACTACCCCAGCGCCCG |
| | | GATCGTGTACACCGCCTGCAGCCACGCCGCCGTGGACGCCCTGTGCGAGAAGGCCCTGAAGTACCTGCCCATCGAC |
| | | AAGTGCAGCCGGATCATTCCCGCTCGGGCTCGGGTGGAGTGCTTCGACAAGTTCAAGGTGAACAGTACCCTCGAGC |
| | | AGTACGTGTTCTGCACCGTGAACGCCCTGCCCGAAACAACTGCCGACATCGTGGTGTTCGACGAGATCAGCATGGCC |
| | | ACCAACTACGACCTGAGCGTGGTTAACGCCCGGCTGCGGGCCAAGCACTACGTGTACATCGGCGACCCCGCCCAGC |
| | | TGCCCGCCCCCCGGACCCTGCTCACCAAGGGCACCCTGGAGCCCGAGTACTTCAACAGCGTGTGCCGGCTGATGAA |
| | | GACCATCGGCCCCGACATGTTCCTGGGCACCTGCCGGCGGTGCCCCGCCGAGATCGTGGACACCGTGAGCGCCCT |
| | | GGTGTACGACAACAAGCTGAAGGCCCACAAGGACAAGAGCGCCCAGTGCTTCAAGATGTTCTACAAGGGCGTGATCA |
| | | CCCACGACGTGAGCAGCGCCATCAACCGGCCCCAGATCGGCGTGGTGCGGGAGTTCCTGACCCGGAACCCCGCCT |
| | | GGCGGAAGGCCGTGTTCATCAGCCCCTACAACAGCCAGAACGCCGTGGCCAGCAAGATCCTGGGCCTGCCCACCCA |
| | | GACCGTGGACAGCTCTCAGGGCAGCGAGTACGACTACGTGATCTTCACCCAGACCACCGAAACAGCCCACAGCTGC |
| | | AACGTCAACCGCTTCAACGTGGCCATCACCCGGGCCAAGGTGGGCATCCTGTGCATCATGAGCGACCGGGACCTGT |
| | | ACGACAAGCTGCAGTTCACCAGCCTGGAGATCCCCCGGAGGAACGTGGCCACCCTGCAG |
| 297 | Secretion | ATGGGCGTGACCGCCCCCCGGACCCTGATCCTGCTCCTGAGCGGCGCCCTGGCCCTGACCGAAACCTGGGCCGGC |
| | signal | AGCAGCGCCGACGCCCAGAGCTTCCTGAACCGGGTGTGCGGCGTGAGCGCCGCTCGGCTGACCCCTTGCGGAACC |
| | sequence | GGAACCAGTACCGACGTGGTCTACCGGGCCTTCGACATCTACAACGACAAGGTGGCCGGCTTCGCCAAGTTCCTGAA |
| | (under- | GACCAACTGCTGTCGGTTCCAGGAGAAGGACGAGGACGATAACCTGATCGACAGCTATTTCGTCGTGAAGCGGCACA |
| | lined) | CCTTCAGCAACTACCAGCACGAGGAAACCATCTACAACCTGCTCAAGGACTGCCCCGCCGTGGCCAAGCACGACTTC |
| | NSP12 | TTTAAGTTCCGGATCGACGGCGACATGGTGCCCCACATCAGTCGGCAACGGCTGACCAAGTACACCATGGCCGACCT |
| | | CGTGTACGCCCTGCGGCACTTCGACGAGGGCAACTGCGACACCCTGAAGGAGATCCTGGTGACCTACAACTGCTGC |
| | | GACGACGACTATTTCAATAAGAAAGATTGGTACGATTTTGTGGAAAACCCTGACATCCTGCGGGTGTACGCCAACCTG |
| | | GGCGAGCGGGTGCGGCAGGCCCTCCTGAAAACCGTCCAGTTCTGCGACGCCATGCGGAACGCCGGCATCGTGGGC |
| | | GTGCTGACCCTGGATAACCAAGACCTGAACGGCAACTGGTACGACTTCGGCGACTTCATCCAGACCACACCCGGCAG |
| | | CGGCGTGCCCGTGGTTGACAGCTACTATAGCCTGTTGATGCCCATCCTGACCCTGACCCGGGCCCTGACCGCCGAG |
| | | AGCCACGTGGATACCGATCTGACAAAGCCCTACATCAAGTGGGACCTGCTGAAGTACGACTTCACCGAGGAGCGGCT |
| | | GAAGCTGTTCGACCGGTACTTCAAGTACTGGGACCAGACCTACCACCCCAACTGCGTGAACTGCCTGGACGACCGGT |
| | | GCATCCTGCACTGCGCCAACTTCAACGTGCTGTTCAGCACCGTGTTCCCCCCTACCAGCTTCGGCCCCCTGGTGCGG |
| | | AAGATTTTCGTCGACGGCGTGCCCTTCGTGGTGAGCACCGGCTACCACTTCCGGGAGCTGGGCGTGGTGCACAACC |
| | | AGGACGTGAACCTGCACAGCTCCCGGCTGAGCTTCAAGGAGCTGCTGGTGTACGCCGCCGACCCCGCCATGCACGC |
| | | CGCAAGCGGCAACCTGCTCCTGGACAAGCGGACCACCTGCTTCAGCGTGGCCGCCCTGACCAACAACGTGGCCTTC |
| | | CAGACAGTGAAACCCGGAAACTTCAACAAGGACTTCTACGACTTCGCCGTGAGCAAGGGCTTCTTCAAGGAGGGCAG |
| | | CAGCGTGGAGCTGAAGCACTTCTTCTTCGCCCAGGACGGCAACGCTGCCATTAGCGACTACGACTACTACCGGTACA |
| | | ACCTGCCCACCATGTGCGACATCCGGCAGCTGTTGTTCGTGGTCGAGGTGGTGGACAAGTACTTCGACTGCTACGAC |
| | | GGCGGCTGCATCAACGCCAACCAGGTGATCGTGAACAACCTGGACAAGAGCGCCGGCTTCCCCTTCAACAAGTGGG |
| | | GCAAGGCCCGGCTGTACTACGACAGCATGAGCTACGAGGACCAGGACGCCCTGTTCGCCTACACCAAGCGGAACGT |
| | | GATCCCCACCATCACCCAGATGAACCTGAAGTACGCCATCAGCGCCAAGAACCGGGCCCGGACCGTGGCCGGCGTG |
| | | AGCATCTGCAGCACCATGACCAACCGGCAGTTCCACCAGAAGCTGCTCAAAAGTATCGCCGCTACCCGGGGCGCCA |
| | | CCGTGGTTATCGGCACCAGCAAGTTCTACGGCGGCTGGCACAACATGCTGAAGACCGTGTACAGCGACGTGGAGAA |
| | | CCCCCACCTGATGGGCTGGGACTACCCCAAGTGCGACCGGGCCATGCCCAACATGCTGCGGATCATGGCCAGCCTG |
| | | GTGCTGGCCCGCAAGCATACCACCTGCTGCAGCCTGAGCCACCGGTTCTACCGGCTGGCCAACGAGTGCGCCCAGG |
| | | TGCTGAGCGAGATGGTGATGTGCGGCGGGAGCCTGTACGTGAAGCCCGGCGGCACCAGCTCTGGCGACGCCACCA |
| | | CCGCCTACGCCAACAGCGTGTTCAACATCTGCCAGGCCGTGACCGCCAACGTGAACGCCCTGCTCAGCACCGACGG |
| | | CAACAAGATCGCCGACAAGTACGTGCGGAACCTGCAGCACCGGCTGTACGAGTGCCTGTACCGGAACCGGGACGTG |
| | | GACACCGACTTCGTGAACGAGTTTTACGCCTACCTGCGGAAGCACTTCAGCATGATGATCCTGAGCGACGACGCCGT |
| | | GGTGTGCTTCAACAGCACCTACGCCAGCCAGGGCCTGGTGGCCAGCATCAAGAACTTCAAGAGCGTGCTGTACTACC |
| | | AGAACAACGTGTTCATGAGCGAGGCCAAGTGCTGGACCGAAACAGACCTGACCAAGGGCCCCCACGAGTTCTGCAG |
| | | CCAGCACACCATGCTGGTGAAGCAGGGCGACGATTACGTGTACCTGCCCTACCCCGACCCCAGCCGGATCCTGGGC |
| | | GCCGGCTGCTTCGTGGACGACATCGTGAAGACCGACGGCACCCTGATGATCGAGCGGTTCGTGAGCCTGGCCATCG |
| | | ACGCCTACCCCCTGACCAAGCACCCCAACCAGGAGTACGCCGACGTGTTCCACCTGTACCTGCAGTACATCCGGAAG |
| | | CTGCACGACGAGCTGACCGGCCACATGCTGGACATGTACAGCGTGATGCTGACCAACGACAACACCAGCCGGTACT |
| | | GGGAGCCCGAGTTCTACGAGGCCATGTACACCCCCCACACCGTGCTGCAG |
| 298 | Secretion | ATGGGCGTGACCGCCCCCCGGACCCTGATCCTGCTCCTGAGCGGCGCCCTGGCCCTGACCGAAACCTGGGCCGGC |
| | signal | AGCAGCAAGATGAGCGACGTGAAGTGCACCAGCGTGGTCCTGCTCAGCGTGCTGCAGCAACTGCGGGTGGAGAGCT |
| | sequence | CCAGCAAGCTGTGGGCCCAGTGCGTCCAGCTCCACAACGACATCCTGCTGGCCAAGGACACCACAGAGGCCTTCGA |
| | (under- | GAAGATGGTGAGCCTGTTGAGCGTGCTGCTGAGCATGCAGGGCGCCGTGGACATCAACAAGCTGTGCGAGGAAATG |
| | lined) | CTGGACAACCGGGCCACCCTGCAG |
| | NSP7 | |
| 299 | Concatemer | ATGGGGGCCGTGGGCGCCTGCGTGCTGTGTAACAGTCAGACCAGCCTGCGGTGCGGCGCCTGCATCCGCAGGCCC |
| | (NSP13-G4S- | TTCCTGTGCTGTAAGTGCTGCTACGACCACGTGATTAGCACAAGCCACAAGCTCGTGCTCAGCGTGAACCCCTACGT |
| | NSP12-G4S- | GTGCAACGCCCCCGGCTGCGACGTGACAGACGTGACCCAGCTGTACCTGGGCGGAATGAGCTACTATTGTAAGAGT |
| | NSP7) | CACAAGCCCCCTATCAGCTTCCCCCTGTGCGCCAACGGCCAGGTGTTCGGCCTGTACAAGAACACCTGCGTGGGCA |
| | | GCGACAACGTGACCGACTTCAACGCCATCGCCACCTGCGACTGGACCAACGCCGGCGACTACATCCTGGCCAACAC |
| | | CTGCACCGAGCGGCTGAAGCTGTTCGCCGCTGAAACACTGAAGGCCACCGAGGAAACCTTCAAGCTGAGCTACGGC |
| | | ATCGCCACCGTGCGGGAGGTGCTCAGCGATCGGGAACTGCACCTGAGCTGGGAGGTGGGCAAGCCCCGGCCTCCT |
| | | CTGAACCGGAACTACGTGTTCACCGGCTACCGGGTGACCAAGAACAGCAAGGTGCAGATCGGCGAGTACACCTTCG |
| | | AGAAGGGCGACTACGGCGACGCCGTGGTCTACCGGGGCACCACAACCTACAAGCTGAACGTGGGCGACTACTTCGT |
| | | GCTGACCAGCCACACCGTGATGCCCCTGAGCGCCCCCACCCTGGTGCCCCAGGAACACTACGTGCGGATCACCGGC |
| | | CTGTACCCCACCCTGAACATCAGCGACGAGTTCAGCTCTAACGTCGCCAACTACCAGAAAGTGGGAATGCAGAAGTA |
| | | TAGCACACTGCAGGGCCCCCCAGGCACCGGCAAGAGCCACTTCGCCATCGGCCTGGCCCTGTACTACCCCAGCGCC |
| | | CGGATCGTGTACACCGCCTGCAGCCACGCCGCCGTGGACGCCCTGTGCGAGAAGGCCCTGAAGTACCTGCCCATCG |
| | | ACAAGTGCAGCCGGATCATTCCCGCTCGGGCTCGGGTGGAGTGCTTCGACAAGTTCAAGGTGAACAGTACCCTCGA |
| | | GCAGTACGTGTTCTGCACCGTGAACGCCCTGCCCGAAACAACTGCCGACATCGTGGTGTTCGACGAGATCAGCATGG |
| | | CCACCAACTACGACCTGAGCGTGGTTAACGCCCGGCTGCGGGCCAAGCACTACGTGTACATCGGCGACCCCGCCCA |
| | | GCTGCCCGCCCCCCGGACCCTGCTCACCAAGGGCACCCTGGAGCCCGAGTACTTCAACAGCGTGTGCCGGCTGATG |
| | | AAGACCATCGGCCCCGACATGTTCCTGGGCACCTGCCGGCGGTGCCCCGCCGAGATCGTGGACACCGTGAGCGCC |
| | | CTGGTGTACGACAACAAGCTGAAGGCCCACAAGGACAAGAGCGCCCAGTGCTTCAAGATGTTCTACAAGGGCGTGAT |
| | | CACCCACGACGTGAGCAGCGCCATCAACCGGCCCCAGATCGGCGTGGTGCGGGAGTTCCTGACCCGGAACCCCGC |
| | | CTGGCGGAAGGCCGTGTTCATCAGCCCCTACAACAGCCAGAACGCCGTGGCCAGCAAGATCCTGGGCCTGCCCACC |
| | | CAGACCGTGGACAGCTCTCAGGGCAGCGAGTACGACTACGTGATCTTCACCCAGACCACCGAAACAGCCCACAGCT |
| | | GCAACGTCAACCGCTTCAACGTGGCCATCACCCGGGCCAAGGTGGGCATCCTGTGCATCATGAGCGACCGGGACCT |
| | | GTACGACAAGCTGCAGTTCACCAGCCTGGAGATCCCCCGGAGGAACGTGGCCACCCTGCAGGGAGGAGGGGGCTC |
| | | TGGTGGCGGAGGAAGTAGCGCCGACGCCCAGAGCTTCCTGAACCGGGTGTGCGGCGTGAGCGCCGCTCGGCTGAC |
| | | CCCTTGCGGAACCGGAACCAGTACCGACGTGGTCTACCGGGCCTTCGACATCTACAACGACAAGGTGGCCGGCTTC |
| | | GCCAAGTTCCTGAAGACCAACTGCTGTCGGTTCCAGGAGAAGGACGAGGACGATAACCTGATCGACAGCTATTTCGT |
| | | CGTGAAGCGGCACACCTTCAGCAACTACCAGCACGAGGAAACCATCTACAACCTGCTCAAGGACTGCCCCGCCGTG |
| | | GCCAAGCACGACTTCTTTAAGTTCCGGATCGACGGCGACATGGTGCCCCACATCAGTCGGCAACGGCTGACCAAGTA |
| | | CACCATGGCCGACCTCGTGTACGCCCTGCGGCACTTCGACGAGGGCAACTGCGACACCCTGAAGGAGATCCTGGTG |
| | | ACCTACAACTGCTGCGACGACGACTATTTCAATAAGAAAGATTGGTACGATTTTGTGGAAAACCCTGACATCCTGCGG |
| | | GTGTACGCCAACCTGGGCGAGCGGGTGCGGCAGGCCCTCCTGAAAACCGTCCAGTTCTGCGACGCCATGCGGAAC |
| | | GCCGGCATCGTGGGCGTGCTGACCCTGGATAACCAAGACCTGAACGGCAACTGGTACGACTTCGGCGACTTCATCC |
| | | AGACCACACCCGGCAGCGGCGTGCCCGTGGTTGACAGCTACTATAGCCTGTTGATGCCCATCCTGACCCTGACCCG |
| | | GGCCCTGACCGCCGAGAGCCACGTGGATACCGATCTGACAAAGCCCTACATCAAGTGGGACCTGCTGAAGTACGAC |
| | | TTCACCGAGGAGCGGCTGAAGCTGTTCGACCGGTACTTCAAGTACTGGGACCAGACCTACCACCCCAACTGCGTGAA |
| | | CTGCCTGGACGACCGGTGCATCCTGCACTGCGCCAACTTCAACGTGCTGTTCAGCACCGTGTTCCCCCCTACCAGCT |
| | | TCGGCCCCCTGGTGCGGAAGATTTTCGTCGACGGCGTGCCCTTCGTGGTGAGCACCGGCTACCACTTCCGGGAGCT |
| | | GGGCGTGGTGCACAACCAGGACGTGAACCTGCACAGCTCCCGGCTGAGCTTCAAGGAGCTGCTGGTGTACGCCGCC |
| | | GACCCCGCCATGCACGCCGCAAGCGGCAACCTGCTCCTGGACAAGCGGACCACCTGCTTCAGCGTGGCCGCCCTG |
| | | ACCAACAACGTGGCCTTCCAGACAGTGAAACCCGGAAACTTCAACAAGGACTTCTACGACTTCGCCGTGAGCAAGGG |
| | | CTTCTTCAAGGAGGGCAGCAGCGTGGAGCTGAAGCACTTCTTCTTCGCCCAGGACGGCAACGCTGCCATTAGCGACT |
| | | ACGACTACTACCGGTACAACCTGCCCACCATGTGCGACATCCGGCAGCTGTTGTTCGTGGTCGAGGTGGTGGACAAG |
| | | TACTTCGACTGCTACGACGGCGGCTGCATCAACGCCAACCAGGTGATCGTGAACAACCTGGACAAGAGCGCCGGCT |
| | | TCCCCTTCAACAAGTGGGGCAAGGCCCGGCTGTACTACGACAGCATGAGCTACGAGGACCAGGACGCCCTGTTCGC |
| | | CTACACCAAGCGGAACGTGATCCCCACCATCACCCAGATGAACCTGAAGTACGCCATCAGCGCCAAGAACCGGGCC |
| | | CGGACCGTGGCCGGCGTGAGCATCTGCAGCACCATGACCAACCGGCAGTTCCACCAGAAGCTGCTCAAAAGTATCG |
| | | CCGCTACCCGGGGCGCCACCGTGGTTATCGGCACCAGCAAGTTCTACGGCGGCTGGCACAACATGCTGAAGACCGT |
| | | GTACAGCGACGTGGAGAACCCCCACCTGATGGGCTGGGACTACCCCAAGTGCGACCGGGCCATGCCCAACATGCTG |
| | | CGGATCATGGCCAGCCTGGTGCTGGCCCGCAAGCATACCACCTGCTGCAGCCTGAGCCACCGGTTCTACCGGCTGG |
| | | CCAACGAGTGCGCCCAGGTGCTGAGCGAGATGGTGATGTGCGGCGGGAGCCTGTACGTGAAGCCCGGCGGCACCA |
| | | GCTCTGGCGACGCCACCACCGCCTACGCCAACAGCGTGTTCAACATCTGCCAGGCCGTGACCGCCAACGTGAACGC |
| | | CCTGCTCAGCACCGACGGCAACAAGATCGCCGACAAGTACGTGCGGAACCTGCAGCACCGGCTGTACGAGTGCCTG |
| | | TACCGGAACCGGGACGTGGACACCGACTTCGTGAACGAGTTTTACGCCTACCTGCGGAAGCACTTCAGCATGATGAT |
| | | CCTGAGCGACGACGCCGTGGTGTGCTTCAACAGCACCTACGCCAGCCAGGGCCTGGTGGCCAGCATCAAGAACTTC |
| | | AAGAGCGTGCTGTACTACCAGAACAACGTGTTCATGAGCGAGGCCAAGTGCTGGACCGAAACAGACCTGACCAAGG |
| | | GCCCCCACGAGTTCTGCAGCCAGCACACCATGCTGGTGAAGCAGGGCGACGATTACGTGTACCTGCCCTACCCCGA |
| | | CCCCAGCCGGATCCTGGGCGCCGGCTGCTTCGTGGACGACATCGTGAAGACCGACGGCACCCTGATGATCGAGCG |
| | | GTTCGTGAGCCTGGCCATCGACGCCTACCCCCTGACCAAGCACCCCAACCAGGAGTACGCCGACGTGTTCCACCTG |
| | | TACCTGCAGTACATCCGGAAGCTGCACGACGAGCTGACCGGCCACATGCTGGACATGTACAGCGTGATGCTGACCAA |
| | | CGACAACACCAGCCGGTACTGGGAGCCCGAGTTCTACGAGGCCATGTACACCCCCCACACCGTGCTGCAGGGAGGA |
| | | GGGGGCTCTGGTGGCGGAGGAAGTAGCAAGATGAGCGACGTGAAGTGCACCAGCGTGGTCCTGCTCAGCGTGCTG |
| | | CAGCAACTGCGGGTGGAGAGCTCCAGCAAGCTGTGGGCCCAGTGCGTCCAGCTCCACAACGACATCCTGCTGGCCA |
| | | AGGACACCACAGAGGCCTTCGAGAAGATGGTGAGCCTGTTGAGCGTGCTGCTGAGCATGCAGGGCGCCGTGGACAT |
| | | CAACAAGCTGTGCGAGGAAATGCTGGACAACCGGGCCACCCTGCAG |
| 300 | Concatemer | ATGGGGGCCGTGGGCGCCTGCGTGCTGTGTAACAGTCAGACCAGCCTGCGGTGCGGCGCCTGCATCCGCAGGCCC |
| | (NSP13- | TTCCTGTGCTGTAAGTGCTGCTACGACCACGTGATTAGCACAAGCCACAAGCTCGTGCTCAGCGTGAACCCCTACGT |
| | G4furG4S- | GTGCAACGCCCCCGGCTGCGACGTGACAGACGTGACCCAGCTGTACCTGGGCGGAATGAGCTACTATTGTAAGAGT |
| | NSP12- | CACAAGCCCCCTATCAGCTTCCCCCTGTGCGCCAACGGCCAGGTGTTCGGCCTGTACAAGAACACCTGCGTGGGCA |
| | G4furG4S- | GCGACAACGTGACCGACTTCAACGCCATCGCCACCTGCGACTGGACCAACGCCGGCGACTACATCCTGGCCAACAC |
| | NSP7) | CTGCACCGAGCGGCTGAAGCTGTTCGCCGCTGAAACACTGAAGGCCACCGAGGAAACCTTCAAGCTGAGCTACGGC |
| | | ATCGCCACCGTGCGGGAGGTGCTCAGCGATCGGGAACTGCACCTGAGCTGGGAGGTGGGCAAGCCCCGGCCTCCT |
| | | CTGAACCGGAACTACGTGTTCACCGGCTACCGGGTGACCAAGAACAGCAAGGTGCAGATCGGCGAGTACACCTTCG |
| | | AGAAGGGCGACTACGGCGACGCCGTGGTCTACCGGGGCACCACAACCTACAAGCTGAACGTGGGCGACTACTTCGT |
| | | GCTGACCAGCCACACCGTGATGCCCCTGAGCGCCCCCACCCTGGTGCCCCAGGAACACTACGTGCGGATCACCGGC |
| | | CTGTACCCCACCCTGAACATCAGCGACGAGTTCAGCTCTAACGTCGCCAACTACCAGAAAGTGGGAATGCAGAAGTA |
| | | TAGCACACTGCAGGGCCCCCCAGGCACCGGCAAGAGCCACTTCGCCATCGGCCTGGCCCTGTACTACCCCAGCGCC |
| | | CGGATCGTGTACACCGCCTGCAGCCACGCCGCCGTGGACGCCCTGTGCGAGAAGGCCCTGAAGTACCTGCCCATCG |
| | | ACAAGTGCAGCCGGATCATTCCCGCTCGGGCTCGGGTGGAGTGCTTCGACAAGTTCAAGGTGAACAGTACCCTCGA |
| | | GCAGTACGTGTTCTGCACCGTGAACGCCCTGCCCGAAACAACTGCCGACATCGTGGTGTTCGACGAGATCAGCATGG |
| | | CCACCAACTACGACCTGAGCGTGGTTAACGCCCGGCTGCGGGCCAAGCACTACGTGTACATCGGCGACCCCGCCCA |
| | | GCTGCCCGCCCCCCGGACCCTGCTCACCAAGGGCACCCTGGAGCCCGAGTACTTCAACAGCGTGTGCCGGCTGATG |
| | | AAGACCATCGGCCCCGACATGTTCCTGGGCACCTGCCGGCGGTGCCCCGCCGAGATCGTGGACACCGTGAGCGCC |
| | | CTGGTGTACGACAACAAGCTGAAGGCCCACAAGGACAAGAGCGCCCAGTGCTTCAAGATGTTCTACAAGGGCGTGAT |
| | | CACCCACGACGTGAGCAGCGCCATCAACCGGCCCCAGATCGGCGTGGTGCGGGAGTTCCTGACCCGGAACCCCGC |
| | | CTGGCGGAAGGCCGTGTTCATCAGCCCCTACAACAGCCAGAACGCCGTGGCCAGCAAGATCCTGGGCCTGCCCACC |
| | | CAGACCGTGGACAGCTCTCAGGGCAGCGAGTACGACTACGTGATCTTCACCCAGACCACCGAAACAGCCCACAGCT |
| | | GCAACGTCAACCGCTTCAACGTGGCCATCACCCGGGCCAAGGTGGGCATCCTGTGCATCATGAGCGACCGGGACCT |
| | | GTACGACAAGCTGCAGTTCACCAGCCTGGAGATCCCCCGGAGGAACGTGGCCACCCTGCAGGGAGGAGGGGGCAG |
| | | ATCTAAGAGATCTGGTGGCGGAGGAAGTAGCGCCGACGCCCAGAGCTTCCTGAACCGGGTGTGCGGCGTGAGCGC |
| | | CGCTCGGCTGACCCCTTGCGGAACCGGAACCAGTACCGACGTGGTCTACCGGGCCTTCGACATCTACAACGACAAG |
| | | GTGGCCGGCTTCGCCAAGTTCCTGAAGACCAACTGCTGTCGGTTCCAGGAGAAGGACGAGGACGATAACCTGATCG |
| | | ACAGCTATTTCGTCGTGAAGCGGCACACCTTCAGCAACTACCAGCACGAGGAAACCATCTACAACCTGCTCAAGGAC |
| | | TGCCCCGCCGTGGCCAAGCACGACTTCTTTAAGTTCCGGATCGACGGCGACATGGTGCCCCACATCAGTCGGCAAC |
| | | GGCTGACCAAGTACACCATGGCCGACCTCGTGTACGCCCTGCGGCACTTCGACGAGGGCAACTGCGACACCCTGAA |
| | | GGAGATCCTGGTGACCTACAACTGCTGCGACGACGACTATTTCAATAAGAAAGATTGGTACGATTTTGTGGAAAACCC |
| | | TGACATCCTGCGGGTGTACGCCAACCTGGGCGAGCGGGTGCGGCAGGCCCTCCTGAAAACCGTCCAGTTCTGCGAC |
| | | GCCATGCGGAACGCCGGCATCGTGGGCGTGCTGACCCTGGATAACCAAGACCTGAACGGCAACTGGTACGACTTCG |
| | | GCGACTTCATCCAGACCACACCCGGCAGCGGCGTGCCCGTGGTTGACAGCTACTATAGCCTGTTGATGCCCATCCTG |
| | | ACCCTGACCCGGGCCCTGACCGCCGAGAGCCACGTGGATACCGATCTGACAAAGCCCTACATCAAGTGGGACCTGC |
| | | TGAAGTACGACTTCACCGAGGAGCGGCTGAAGCTGTTCGACCGGTACTTCAAGTACTGGGACCAGACCTACCACCCC |
| | | AACTGCGTGAACTGCCTGGACGACCGGTGCATCCTGCACTGCGCCAACTTCAACGTGCTGTTCAGCACCGTGTTCCC |
| | | CCCTACCAGCTTCGGCCCCCTGGTGCGGAAGATTTTCGTCGACGGCGTGCCCTTCGTGGTGAGCACCGGCTACCAC |
| | | TTCCGGGAGCTGGGCGTGGTGCACAACCAGGACGTGAACCTGCACAGCTCCCGGCTGAGCTTCAAGGAGCTGCTGG |
| | | TGTACGCCGCCGACCCCGCCATGCACGCCGCAAGCGGCAACCTGCTCCTGGACAAGCGGACCACCTGCTTCAGCGT |
| | | GGCCGCCCTGACCAACAACGTGGCCTTCCAGACAGTGAAACCCGGAAACTTCAACAAGGACTTCTACGACTTCGCCG |
| | | TGAGCAAGGGCTTCTTCAAGGAGGGCAGCAGCGTGGAGCTGAAGCACTTCTTCTTCGCCCAGGACGGCAACGCTGC |
| | | CATTAGCGACTACGACTACTACCGGTACAACCTGCCCACCATGTGCGACATCCGGCAGCTGTTGTTCGTGGTCGAGG |
| | | TGGTGGACAAGTACTTCGACTGCTACGACGGCGGCTGCATCAACGCCAACCAGGTGATCGTGAACAACCTGGACAAG |
| | | AGCGCCGGCTTCCCCTTCAACAAGTGGGGCAAGGCCCGGCTGTACTACGACAGCATGAGCTACGAGGACCAGGACG |
| | | CCCTGTTCGCCTACACCAAGCGGAACGTGATCCCCACCATCACCCAGATGAACCTGAAGTACGCCATCAGCGCCAAG |
| | | AACCGGGCCCGGACCGTGGCCGGCGTGAGCATCTGCAGCACCATGACCAACCGGCAGTTCCACCAGAAGCTGCTCA |
| | | AAAGTATCGCCGCTACCCGGGGCGCCACCGTGGTTATCGGCACCAGCAAGTTCTACGGCGGCTGGCACAACATGCT |
| | | GAAGACCGTGTACAGCGACGTGGAGAACCCCCACCTGATGGGCTGGGACTACCCCAAGTGCGACCGGGCCATGCC |
| | | CAACATGCTGCGGATCATGGCCAGCCTGGTGCTGGCCCGCAAGCATACCACCTGCTGCAGCCTGAGCCACCGGTTC |
| | | TACCGGCTGGCCAACGAGTGCGCCCAGGTGCTGAGCGAGATGGTGATGTGCGGGGGGAGCCTGTACGTGAAGCCC |
| | | GGCGGCACCAGCTCTGGCGACGCCACCACCGCCTACGCCAACAGCGTGTTCAACATCTGCCAGGCCGTGACCGCCA |
| | | ACGTGAACGCCCTGCTCAGCACCGACGGCAACAAGATCGCCGACAAGTACGTGCGGAACCTGCAGCACCGGCTGTA |
| | | CGAGTGCCTGTACCGGAACCGGGACGTGGACACCGACTTCGTGAACGAGTTTTACGCCTACCTGCGGAAGCACTTCA |
| | | GCATGATGATCCTGAGCGACGACGCCGTGGTGTGCTTCAACAGCACCTACGCCAGCCAGGGCCTGGTGGCCAGCAT |
| | | CAAGAACTTCAAGAGCGTGCTGTACTACCAGAACAACGTGTTCATGAGCGAGGCCAAGTGCTGGACCGAAACAGACC |
| | | TGACCAAGGGCCCCCACGAGTTCTGCAGCCAGCACACCATGCTGGTGAAGCAGGGCGACGATTACGTGTACCTGCC |
| | | CTACCCCGACCCCAGCCGGATCCTGGGCGCCGGCTGCTTCGTGGACGACATCGTGAAGACCGACGGCACCCTGATG |
| | | ATCGAGCGGTTCGTGAGCCTGGCCATCGACGCCTACCCCCTGACCAAGCACCCCAACCAGGAGTACGCCGACGTGT |
| | | TCCACCTGTACCTGCAGTACATCCGGAAGCTGCACGACGAGCTGACCGGCCACATGCTGGACATGTACAGCGTGATG |
| | | CTGACCAACGACAACACCAGCCGGTACTGGGAGCCCGAGTTCTACGAGGCCATGTACACCCCCCACACCGTGCTGC |
| | | AGGGAGGAGGGGGCAGATCTAAGAGATCTGGTGGCGGAGGAAGTAGCAAGATGAGCGACGTGAAGTGCACCAGCG |
| | | TGGTCCTGCTCAGCGTGCTGCAGCAACTGCGGGTGGAGAGCTCCAGCAAGCTGTGGGCCCAGTGCGTCCAGCTCCA |
| | | CAACGACATCCTGCTGGCCAAGGACACCACAGAGGCCTTCGAGAAGATGGTGAGCCTGTTGAGCGTGCTGCTGAGC |
| | | ATGCAGGGCGCCGTGGACATCAACAAGCTGTGCGAGGAAATGCTGGACAACCGGGCCACCCTGCAG |
| 301 | SARS-CoV- | MGVKVLFALICIAVAEAKRVQPTESIVRFPNITNLCPFGEVFNATRFASVYAWNRKRISNCVADYSVLYNSASFSTFKCYGVS |
| | 2 RBD | PTKLNDLCFTNVYADSFVIRGDEVRQIAPGQTGKIADYNYKLPDDFTGCVIAWNSNNLDSKVGGNYNYLYRLFRKSNLKPFE |
| | immunogen | RDISTEIYQAGSTPCNGVEGFNCYFPLQSYGFQPTNGVGYQPYRVVVLSFELLHAPATVCGPKKSTNLVKNKCVNFGYIPE |
| | fused to | APRDGQAYVRKDGEWVLLSTFL |
| | a T4 foldon | |
| | multi- | |
| | merization | |
| | domain | |
| 302 | Spike | MFVFLVLLPLVSSQCVNLTTRTQLPPAYTNSFTRGVYYPDKVFRSSVLHSTQDLFLPFFSNVTWFHAIHVSGTNGTKRFDN |
| | | PVLPFNDGVYFASTEKSNIIRGWIFGTTLDSKTQSLLIVNNATNVVIKVCEFQFCNDPFLGVYYHKNNKSWMESEFRVYSSA |
| | | NNCTFEYVSQPFLMDLEGKQGNFKNLREFVFKNIDGYFKIYSKHTPINLVRDLPQGFSALEPLVDLPIGINITRFQTLLALHRS |
| | | YLTPGDSSSGWTAGAAAYYVGYLQPRTFLLKYNENGTITDAVDCALDPLSETKCTLKSFTVEKGIYQTSNFRVQPTESIVRF |
| | | PNITNLCPFGEVFNATRFASVYAWNRKRISNCVADYSVLYNSASFSTFKCYGVSPTKLNDLCFTNVYADSFVIRGDEVRQIA |
| | | PGQTGKIADYNYKLPDDFTGCVIAWNSNNLDSKVGGNYNYLYRLFRKSNLKPFERDISTEIYQAGSTPCNGVEGFNCYFPL |
| | | QSYGFQPTNGVGYQPYRVVVLSFELLHAPATVCGPKKSTNLVKNKCVNFNFNGLTGTGVLTESNKKFLPFQQFGRDIADTT |
| | | DAVRDPQTLEILDITPCSFGGVSVITPGTNTSNQVAVLYQDVNCTEVPVAIHADQLTPTWRVYSTGSNVFQTRAGCLIGAEH |
| | | VNNSYECDIPIGAGICASYQTQTNSPRRARSVASQSIIAYTMSLGAENSVAYSNNSIAIPTNFTISVTTEILPVSMTKTSVDCT |
| | | MYICGDSTECSNLLLQYGSFCTQLNRALTGIAVEQDKNTQEVFAQVKQIYKTPPIKDFGGFNFSQILPDPSKPSKRSFIEDLL |
| | | FNKVTLADAGFIKQYGDCLGDIAARDLICAQKFNGLTVLPPLLTDEMIAQYTSALLAGTITSGWTFGAGAALQIPFAMQMAYR |
| | | FNGIGVTQNVLYENQKLIANQFNSAIGKIQDSLSSTASALGKLQDVVNQNAQALNTLVKQLSSNFGAISSVLNDILSRLDPPE |
| | | AEVQIDRLITGRLQSLQTYVTQQLIRAAEIRASANLAATKMSECVLGQSKRVDFCGKGYHLMSFPQSAPHGVVFLHVTYVPA |
| | | QEKNFTTAPAICHDGKAHFPREGVFVSNGTHWFVTQRNFYEPQIITTDNTFVSGNCDVVIGIVNNTVYDPLQPELDSFKEEL |
| | | DKYFKNHTSPDVDLGDISGINASVVNIQKEIDRLNEVAKNLNESLIDLQELGKYEQYIKWPWYIWLGFIAGLIAIVMVTIMLCC |
| | | MTSCCSCLKGCCSCGSCCKFDEDDSEPVLKGVKLHYT |
| 303 | SARS-CoV- | ATGGGAGTCAAAGTTCTGTTTGCCCTGATCTGCATTGCTGTGGCCGAGGCCAAGAGAGTCCAACCAACAGAATCTATT |
| | 2 RBD | GTTAGATTTCCTAATATTACAAACTTGTGCCCTTTTGGTGAAGTTTTTAACGCCACCAGATTTGCATCCGTGTATGCTTG |
| | immunogen | GAACAGGAAGAGAATCAGCAACTGTGTTGCTGATTATTCTGTCCTATATAATTCCGCATCATTTTCCACTTTTAAGTGTT |
| | fused to | ATGGAGTGTCTCCTACTAAATTAAATGATCTCTGCTTTACTAATGTCTATGCAGATTCATTTGTAATTAGAGGTGATGAA |
| | a T4 foldon | GTCAGACAAATCGCTCCAGGGCAAACTGGAAAGATTGCTGATTATAATTATAAATTACCAGATGATTTTACAGGCTGCG |
| | multi- | TTATAGCTTGGAATTCTAACAATCTTGATTCTAAGGTTGGTGGTAATTATAATTACCTGTATAGATTGTTTAGGAAGTCT |
| | merization | AATCTCAAACCTTTTGAGAGAGATATTTCAACTGAAATCTATCAGGCCGGTAGCACACCTTGTAATGGTGTTGAAGGTT |
| | domain | TTAATTGTTACTTTCCTTTACAATCATATGGTTTCCAACCCACTAATGGTGTTGGTTACCAACCATACAGAGTAGTAGTA |
| | | CTTTCTTTTGAACTTCTACATGCACCAGCAACTGTTTGTGGACCTAAAAAGTCTACTAATTTGGTTAAAAACAAATGTGT |
| | | CAATTTCGGGTATATCCCTGAAGCCCCCAGGGACGGCCAGGCTTACGTCAGAAAGGATGGAGAGTGGGTGCTCTTGA |
| | | GCACCTTCCTG |
| 304 | Spike | ATGTTCGTGTTCCTGGTGCTGCTGCCTCTGGTGTCCAGCCAGTGTGTGAACCTGACCACCAGAACACAGCTGCCTCC |
| | | AGCCTACACCAACAGCTTTACCAGAGGCGTGTACTACCCCGACAAGGTGTTCAGATCCAGCGTGCTGCACTCTACCC |
| | | AGGACCTGTTCCTGCCTTTCTTCAGCAACGTGACCTGGTTCCACGCCATCCACGTGTCCGGCACCAATGGCACCAAG |
| | | AGATTCGACAACCCCGTGCTGCCCTTCAACGACGGGGTGTACTTTGCCAGCACCGAGAAGTCCAACATCATCAGAGG |
| | | CTGGATCTTCGGCACCACACTGGACAGCAAGACCCAGAGCCTGCTGATCGTGAACAACGCCACCAACGTGGTCATCA |
| | | AAGTGTGCGAGTTCCAGTTCTGCAACGACCCCTTCCTGGGCGTCTACTACCACAAGAACAACAAGAGCTGGATGGAA |
| | | AGCGAGTTCCGGGTGTACAGCAGCGCCAACAACTGCACCTTCGAGTACGTGTCCCAGCCTTTCCTGATGGACCTGGA |
| | | AGGCAAGCAGGGCAACTTCAAGAACCTGCGCGAGTTCGTGTTTAAGAACATCGACGGCTACTTCAAGATCTACAGCA |
| | | AGCACACCCCTATCAACCTCGTGCGGGATCTGCCTCAGGGCTTCTCTGCTCTGGAACCCCTGGTGGATCTGCCCATC |
| | | GGCATCAACATCACCCGGTTTCAGACACTGCTGGCCCTGCACAGAAGCTACCTGACACCTGGCGATAGCAGCAGCG |
| | | GATGGACAGCTGGTGCCGCCGCTTACTATGTGGGCTACCTGCAGCCTAGAACCTTCCTGCTGAAGTACAACGAGAAC |
| | | GGCACCATCACCGACGCCGTGGATTGTGCTCTGGATCCTCTGAGCGAGACAAAGTGCACCCTGAAGTCCTTCACCGT |
| | | GGAAAAGGGCATCTACCAGACCAGCAACTTCCGGGTGCAGCCCACCGAATCCATCGTGCGGTTCCCCAATATCACCA |
| | | ATCTGTGCCCCTTCGGCGAGGTGTTCAATGCCACCAGATTCGCCTCTGTGTACGCCTGGAACCGGAAGCGGATCAGC |
| | | AATTGCGTGGCCGACTACTCCGTGCTGTACAACTCCGCCAGCTTCAGCACCTTCAAGTGCTACGGCGTGTCCCCTAC |
| | | CAAGCTGAACGACCTGTGCTTCACAAACGTGTACGCCGACAGCTTCGTGATCCGGGGAGATGAAGTGCGGCAGATTG |
| | | CCCCTGGACAGACAGGCAAGATCGCCGACTACAACTACAAGCTGCCCGACGACTTCACCGGCTGTGTGATTGCCTG |
| | | GAACAGCAACAACCTGGACTCCAAAGTCGGCGGCAACTACAATTACCTGTACCGGCTGTTCCGGAAGTCCAATCTGA |
| | | AGCCCTTCGAGCGGGACATCTCCACCGAGATCTATCAGGCCGGCAGCACCCCTTGTAACGGCGTGGAAGGCTTCAA |
| | | CTGCTACTTCCCACTGCAGTCCTACGGCTTTCAGCCCACAAATGGCGTGGGCTATCAGCCCTACAGAGTGGTGGTGC |
| | | TGAGCTTCGAACTGCTGCATGCCCCTGCCACAGTGTGCGGCCCTAAGAAAAGCACCAATCTCGTGAAGAACAAATGC |
| | | GTGAACTTCAACTTCAACGGCCTGACCGGCACCGGCGTGCTGACAGAGAGCAACAAGAAGTTCCTGCCATTCCAGCA |
| | | GTTTGGCCGGGATATCGCCGATACCACAGACGCCGTTAGAGATCCCCAGACACTGGAAATCCTGGACATCACCCCTT |
| | | GCAGCTTCGGCGGAGTGTCTGTGATCACCCCTGGCACCAACACCAGCAATCAGGTGGCAGTGCTGTACCAGGACGT |
| | | GAACTGTACCGAAGTGCCCGTGGCCATTCACGCCGATCAGCTGACACCTACATGGCGGGTGTACTCCACCGGCAGC |
| | | AATGTGTTTCAGACCAGAGCCGGCTGTCTGATCGGAGCCGAGCACGTGAACAATAGCTACGAGTGCGACATCCCCAT |
| | | CGGCGCTGGAATCTGCGCCAGCTACCAGACACAGACAAACAGCCCTCGGAGAGCCAGAAGCGTGGCCAGCCAGAG |
| | | CATCATTGCCTACACAATGTCTCTGGGCGCCGAGAACAGCGTGGCCTACTCCAACAACTCTATCGCTATCCCCACCAA |
| | | CTTCACCATCAGCGTGACCACAGAGATCCTGCCTGTGTCCATGACCAAGACCAGCGTGGACTGCACCATGTACATCT |
| | | GCGGCGATTCCACCGAGTGCTCCAACCTGCTGCTGCAGTACGGCAGCTTCTGCACCCAGCTGAATAGAGCCCTGAC |
| | | AGGGATCGCCGTGGAACAGGACAAGAACACCCAAGAGGTGTTCGCCCAAGTGAAGCAGATCTACAAGACCCCTCCTA |
| | | TCAAGGACTTCGGCGGCTTCAATTTCAGCCAGATTCTGCCCGATCCTAGCAAGCCCAGCAAGCGGAGCTTCATCGAG |
| | | GACCTGCTGTTCAACAAAGTGACACTGGCCGACGCCGGCTTCATCAAGCAGTATGGCGATTGTCTGGGCGACATTGC |
| | | CGCCAGGGATCTGATTTGCGCCCAGAAGTTTAACGGACTGACAGTGCTGCCTCCTCTGCTGACCGATGAGATGATCG |
| | | CCCAGTACACATCTGCCCTGCTGGCCGGCACAATCACAAGCGGCTGGACATTTGGAGCAGGCGCCGCTCTGCAGAT |
| | | CCCCTTTGCTATGCAGATGGCCTACCGGTTCAACGGCATCGGAGTGACCCAGAATGTGCTGTACGAGAACCAGAAGC |
| | | TGATCGCCAACCAGTTCAACAGCGCCATCGGCAAGATCCAGGACAGCCTGAGCAGCACAGCAAGCGCCCTGGGAAA |
| | | GCTGCAGGACGTGGTCAACCAGAATGCCCAGGCACTGAACACCCTGGTCAAGCAGCTGTCCTCCAACTTCGGCGCC |
| | | ATCAGCTCTGTGCTGAACGATATCCTGAGCAGACTGGACCCTCCTGAGGCCGAGGTGCAGATCGACAGACTGATCAC |
| | | AGGCAGACTGCAGAGCCTCCAGACATACGTGACCCAGCAGCTGATCAGAGCCGCCGAGATTAGAGCCTCTGCCAAT |
| | | CTGGCCGCCACCAAGATGTCTGAGTGTGTGCTGGGCCAGAGCAAGAGAGTGGACTTTTGCGGCAAGGGCTACCACC |
| | | TGATGAGCTTCCCTCAGTCTGCCCCTCACGGCGTGGTGTTTCTGCACGTGACATATGTGCCCGCTCAAGAGAAGAAT |
| | | TTCACCACCGCTCCAGCCATCTGCCACGACGGCAAAGCCCACTTTCCTAGAGAAGGCGTGTTCGTGTCCAACGGCAC |
| | | CCATTGGTTCGTGACACAGCGGAACTTCTACGAGCCCCAGATCATCACCACCGACAACACCTTCGTGTCTGGCAACT |
| | | GCGACGTCGTGATCGGCATTGTGAACAATACCGTGTACGACCCTCTGCAGCCCGAGCTGGACAGCTTCAAAGAGGAA |
| | | CTGGACAAGTACTTTAAGAACCACACAAGCCCCGACGTGGACCTGGGCGATATCAGCGGAATCAATGCCAGCGTCGT |
| | | GAACATCCAGAAAGAGATCGACCGGCTGAACGAGGTGGCCAAGAATCTGAACGAGAGCCTGATCGACCTGCAAGAA |
| | | CTGGGGAAGTACGAGCAGTACATCAAGTGGCCCTGGTACATCTGGCTGGGCTTTATCGCCGGACTGATTGCCATCGT |
| | | GATGGTCACAATCATGCTGTGTTGCATGACCAGCTGCTGTAGCTGCCTGAAGGGCTGTTGTAGCTGTGGCAGCTGCT |
| | | GCAAGTTCGACGAGGACGATTCTGAGCCCGTGCTGAAGGGCGTGAAACTGCACTACACA |
| 305 | CVB3 | TTAAAACAGCCTGTGGGTTGATCCCACCCACAGGCCCATTGGGCGCTAGCACTCTGGTATCACGGTACCTTTGTGCG |
| | modified | CCTGTTTTATACCCCCTCCCCCAACTGTAACTTAGAAGTAACACACACCGATCAACAGTCAGCGTGGCACACCAGCCA |
| | | CGTTTTGATCAAGCACTTCTGTTACCCCGGACTGAGTATCAATAGACTGCTCACGCGGTTGAAGGAGAAAGCGTTCGT |
| | | TATCCGGCCAACTACTTCGAAAAACCTAGTAACACCGTGGAAGTTGCAGAGTGTTTCGCTCAGCACTACCCCAGTGTA |
| | | GATCAGGTCGATGAGTCACCGCATTCCCCACGGGCGACCGTGGCGGTGGCTGCGTTGGCGGCCTGCCCATGGGGA |
| | | AACCCATGGGACGCTCTAATACAGACATGGTGCGAAGAGTCTATTGAGCTAGTTGGTAGTCCTCCGGCCCCTGAATG |
| | | CGGCTAATCCTAACTGCGGAGCACACACCCTCAAGCCAGAGGGCAGTGTGTCGTAACGGGCAACTCTGCAGCGGAA |
| | | CCGACTACTTTGGGTGTCCGTGTTTCATTTTATTCCTATACTGGCTGCTTATGGTGACAATTGAGAGATCGTTACCATA |
| | | TAGCTATTGGATTGGCCATCCGGTGACTAATAGAGCTATTATATATCCCTTTGTTGGGTTTATACCACTTAGCTTGAAA |
| | | GAGGTTAAAACATTACAATTCATTGTTAAGTTGAATACAGCAAC |
| 306 | EV71 | TTAAAACAGCTGTGGGTTGTCACCCACCCACAGGGTCCACTGGGCGCTAGTACACTGGTATCTCGGTACCTTTGTAC |
| | modified | GCCTGTTTTATACCCCCTCCCTGATTTGCAACTTAGAAGCAACGCAAACCAGATCAATAGTAGGTGTGACATACCAGT |
| | | CGCATCTTGATCAAGCACTTCTGTATCCCCGGACCGAGTATCAATAGACTGTGCACACGGTTGAAGGAGAAAACGTCC |
| | | GTTACCCGGCTAACTACTTCGAGAAGCCTAGTAACGCCATTGAAGTTGCAGAGTGTTTCGCTCAGCACTCCCCCCGT |
| | | GTAGATCAGGTCGATGAGTCACCGCATTCCCCACGGGCGACCGTGGCGGTGGCTGCGTTGGCGGCCTGCCTATGG |
| | | GGTAACCCATAGGACGCTCTAATACGGACATGGCGTGAAGAGTCTATTGAGCTAGTTAGTAGTCCTCCGGCCCCTGA |
| | | ATGCGGCTAATCCTAACTGCGGAGCACATACCCTTAATCCAAAGGGCAGTGTGTCGTAACGGGCAACTCTGCAGCGG |
| | | AACCGACTACTTTGGGTGTCCGTGTTTCTTTTTATTCTTGTATTGGCTGCTTATGGTGACAATTAAAGAATTGTTACCAT |
| | | ATAGCTATTGGATTGGCCATCCAGTGTCAAACAGAGCTATTGTATATCTCTTTGTTGGATTCACACCTCTCACTCTTGA |
| | | AACGTTACACACCCTCAATTACATTATACTGCTGAACACGAAGCGGCCACC |

1. A circular polyribonucleotide comprising an open reading frame encoding a coronavirus immunogen, wherein the coronavirus immunogen comprises an amino acid sequence having at least 95% sequence identity with the amino acid sequence of any one of SEQ ID NOs: 63-111 and 283-291, wherein the circular polyribonucleotide further comprises a sequence encoding an influenza immunogen.

2. The circular polyribonucleotide of claim 1, wherein the coronavirus immunogen is a RBD immunogen having at least 95% identity with the amino acid sequence of any one of SEQ ID NOs: 63-68, 74, 79, 81-86, and 98-111.

3. The circular polyribonucleotide of claim 1, wherein the coronavirus immunogen is a Spike immunogen having at least 95% identity with the amino acid sequence of any one of SEQ ID NOs: 69-73, 75-78, 80, 87-97 and 283-286.

4. The circular polyribonucleotide of claim 1, wherein the coronavirus immunogen is a nonstructural protein (nsp) having at least 95% identity with the amino acid sequence of any one of SEQ ID NOs: 291-295.

5. (canceled)

6. The circular polyribonucleotide of claim 1, wherein the open reading frame comprises a nucleic acid sequence having at least 95% sequence identity with the nucleic acid sequence of any one of SEQ ID NOs: 112-174 and 292-300.

7. The circular polyribonucleotide of claim 6, wherein the coronavirus immunogen is a RBD immunogen having at least 95% identity with the nucleic acid sequence of any one of SEQ ID NOs: 112-117, 123, 128, 133-138, and 163-174.

8. The circular polyribonucleotide of claim 6, wherein the coronavirus immunogen is a Spike immunogen having at least 95% identity with the nucleic sequence of any one of SEQ ID NOs: 118-122, 124-127, 129-132, 139-162, and 287-291.

9. The circular polyribonucleotide of claim 6, wherein the coronavirus immunogen is a nsp having at least 95% identity with the nucleic sequence of any one of SEQ ID NOs: 296-300.

10-15. (canceled)

16. A circular polyribonucleotide comprising a first sequence encoding a coronavirus immunogen having at least 95% sequence identity with the amino acid sequence of any one of SEQ ID NOs: 63-111 and 283-291 and a second sequence encoding a polypeptide adjuvant and/or multimerization domain.

17. (canceled)

18. An immunogenic composition comprising a first circular polyribonucleotide comprising an open reading frame encoding a coronavirus immunogen, wherein the coronavirus immunogen comprises an amino acid sequence having at least 95% sequence identity with the amino acid sequence of any one of SEQ ID NOs: 63-111 and 283-291, a second circular polyribonucleotide, and a pharmaceutically acceptable carrier or excipient.

19. (canceled)

20. The immunogenic composition of claim 18, wherein the second circular polyribonucleotide comprises an open reading frame encoding a second polypeptide immunogen.

21. The immunogenic composition of claim 18, wherein the second circular polyribonucleotide comprises an open reading frame encoding a polypeptide adjuvant.

22. A linear polyribonucleotide comprising an open reading frame encoding a coronavirus immunogen, wherein the coronavirus immunogen comprises an amino acid sequence having at least 95% sequence identity with the amino acid sequence of any one of SEQ ID NOs: 63-111 and 283-291, wherein the linear polyribonucleotide further comprises a sequence encoding an influenza immunogen.

23. (canceled)

24. The linear polyribonucleotide of claim 22, wherein the open reading frame comprises a nucleic acid sequence having at least 95% sequence identity with the nucleic acid sequence of any one of SEQ ID NOs: 112-174 and 292-300.

25-29. (canceled)

30. A linear polyribonucleotide comprising a first sequence encoding a coronavirus immunogen having at least 95% sequence identity with the amino acid sequence of any one of SEQ ID NOs: 63-111 and 283-291 and a second sequence encoding a multimerization domain, a second coronavirus immunogen, and/or polypeptide adjuvant.

31. An immunogenic composition comprising the linear polyribonucleotide of claim 22 and a pharmaceutically acceptable carrier or excipient.

32. The immunogenic composition of claim 31, wherein the composition further comprises a second linear polyribonucleotide, wherein the second linear polyribonucleotide comprises an open reading frame encoding a second polypeptide immunogen and/or polypeptide adjuvant.

33-34. (canceled)

35. A method of inducing an immune response in a subject against SARS-CoV-2, the method administering to the subject the circular polyribonucleotide of claim 1.

36. A method of preventing a SARS-CoV-2 infection in a subject, the method comprising administering to the subject the circular polyribonucleotide of claim 1.

The application's sequence listing, which the Patent Office published only in electronic form, follows.

SEQUENCE LISTING (336 sequences)

SEQ ID NO: 1 - protein, 1273 aa, Severe acute respiratory syndrome coronavirus 2
MFVFLVLLPLVSSQCVNLTTRTQLPPAYTNSFTRGVYYPDKVFRSSVLHSTQDLFLPFFSNVTWFHAIHVSGTNGTKRFDNPVLPFNDGVYFASTEKSNIIRGWIFGTTLDSKTQSLLIVNNATNVVIKVCEFQFCNDPFLGVYYHKNNKSWMESEFRVYSSANNCTFEYVSQPFLMDLEGKQGNFKNLREFVFKNIDGYFKIYSKHTPINLVRDLPQGFSALEPLVDLPIGINITRFQTLLALHRSYLTPGDSSSGWTAGAAAYYVGYLQPRTFLLKYNENGTITDAVDCALDPLSETKCTLKSFTVEKGIYQTSNFRVQPTESIVRFPNITNLCPFGEVFNATRFASVYAWNRKRISNCVADYSVLYNSASFSTFKCYGVSPTKLNDLCFTNVYADSFVIRGDEVRQIAPGQTGKIADYNYKLPDDFTGCVIAWNSNNLDSKVGGNYNYLYRLFRKSNLKPFERDISTEIYQAGSTPCNGVEGFNCYFPLQSYGFQPTNGVGYQPYRVVVLSFELLHAPATVCGPKKSTNLVKNKCVNFNFNGLTGTGVLTESNKKFLPFQQFGRDIADTTDAVRDPQTLEILDITPCSFGGVSVITPGTNTSNQVAVLYQDVNCTEVPVAIHADQLTPTWRVYSTGSNVFQTRAGCLIGAEHVNNSYECDIPIGAGICASYQTQTNSPRRARSVASQSIIAYTMSLGAENSVAYSNNSIAIPTNFTISVTTEILPVSMTKTSVDCTMYICGDSTECSNLLLQYGSFCTQLNRALTGIAVEQDKNTQEVFAQVKQIYKTPPIKDFGGFNFSQILPDPSKPSKRSFIEDLLFNKVTLADAGFIKQYGDCLGDIAARDLICAQKFNGLTVLPPLLTDEMIAQYTSALLAGTITSGWTFGAGAALQIPFAMQMAYRFNGIGVTQNVLYENQKLIANQFNSAIGKIQDSLSSTASALGKLQDVVNQNAQALNTLVKQLSSNFGAISSVLNDILSRLDKVEAEVQIDRLITGRLQSLQTYVTQQLIRAAEIRASANLAATKMSECVLGQSKRVDFCGKGYHLMSFPQSAPHGVVFLHVTYVPAQEKNFTTAPAICHDGKAHFPREGVFVSNGTHWFVTQRNFYEPQIITTDNTFVSGNCDVVIGIVNNTVYDPLQPELDSFKEELDKYFKNHTSPDVDLGDISGINASVVNIQKEIDRLNEVAKNLNESLIDLQELGKYEQYIKWPWYIWLGFIAGLIAIVMVTIMLCCMTSCCSCLKGCCSCGSCCKFDEDDSEPVLKGVKLHYT

SEQ ID NO: 2 - protein, 75 aa, Severe acute respiratory syndrome coronavirus 2
MYSFVSEETGTLIVNSVLLFLAFVVFLLVTLAILTALRLCAYCCNIVNVSLVKPSFYVYSRVKNLNSSRVPDLLV

SEQ ID NO: 3 - protein, 222 aa, Severe acute respiratory syndrome coronavirus 2
MADSNGTITVEELKKLLEQWNLVIGFLFLTWICLLQFAYANRNRFLYIIKLIFLWLLWPVTLACFVLAAVYRINWITGGIAIAMACLVGLMWLSYFIASFRLFARTRSMWSFNPETNILLNVPLHGTILTRPLLESELVIGAVILRGHLRIAGHHLGRCDIKDLPKEITVATSRTLSYYKLGASQRVAGDSGFAAYSRYRIGNYKLNTDHSSSSDNIALLVQ

SEQ ID NO: 4 - protein, 419 aa, Severe acute respiratory syndrome coronavirus 2
MSDNGPQNQRNAPRITFGGPSDSTGSNQNGERSGARSKQRRPQGLPNNTASWFTALTQHGKEDLKFPRGQGVPINTNSSPDDQIGYYRRATRRIRGGDGKMKDLSPRWYFYYLGTGPEAGLPYGANKDGIIWVATEGALNTPKDHIGTRNPANNAAIVLQLPQGTTLPKGFYAEGSRGGSQASSRSSSRSRNSSRNSTPGSSRGTSPARMAGNGGDAALALLLLDRLNQLESKMSGKGQQQQGQTVTKKSAAEASKKPRQKRTATKAYNVTQAFGRRGPEQTQGNFGDQELIRQGTDYKHWPQIAQFAPSASAFFGMSRIGMEVTPSGTWLTYTGAIKLDDKDPNFKDQVILLNKHIDAYKTFPPTEPKKDKKKKADETQALPQRQKKQQTVTLLPAADLDDFSKQLQQSMSSADSTQA

SEQ ID NO: 5 - protein, 275 aa, Severe acute respiratory syndrome coronavirus 2
MDLFMRIFTIGTVTLKQGEIKDATPSDFVRATATIPIQASLPFGWLIVGVALLAVFQSASKIITLKKRWQLALSKGVHFVCNLLLLFVTVYSHLLLVAAGLEAPFLYLYALVYFLQSINFVRIIMRLWLCWKCRSKNPLLYDANYFLCWHTNCYDYCIPYNSVTSSIVITSGDGTTSPISEHDYQIGGYTEKWESGVKDCVVLHSYFTSDYYQLYSTQLSTDTGVEHVTFFIYNKIVDEPEEHVQIHTIDGSSGVVNPVMEPIYDEPTTTTSVPL

SEQ ID NO: 6 - protein, 61 aa, Severe acute respiratory syndrome coronavirus 2
MFHLVDFQVTIAEILLIIMRTFKVSIWNLDYIINLIIKNLSKSLTENKYSQLDEEQPMEID

SEQ ID NO: 7 - protein, 121 aa, Severe acute respiratory syndrome coronavirus 2
MKIILFLALITLATCELYHYQECVRGTTVLLKEPCSSGTYEGNSPFHPLADNKFALTCFSTQFAFACPDGVKHVYQLRARSVSPKLFIRQEEVQELYSPIFLIVAAIVFITLCFTLKRKTE

SEQ ID NO: 8 - protein, 43 aa, Severe acute respiratory syndrome coronavirus 2
MIELSLIDFYLCFLAFLLFLVLIMLIIFWFSLELQDHNETCHA

SEQ ID NO: 9 - protein, 121 aa, Severe acute respiratory syndrome coronavirus 2
MKFLVFLGIITTVAAFHQECSLQSCTQHQPYVVDDPCPIHFYSKWYIRVGARKSAPLIELCVDEAGSKSPIQYIDIGNYTVSCLPFTINCQEPKLGSLVVRCSFYEDFLEYHDVRVVLDFI

SEQ ID NO: 10 - protein, 38 aa, Severe acute respiratory syndrome coronavirus 2
MGYINVFAFPFTIYSLLLCRMNSRNYIAQVDVVNFNLT

SEQ ID NO: 11 - DNA, 3822 bp, Severe acute respiratory syndrome coronavirus 2
  source 1..3822: mol_type = genomic DNA
atgtttgtttttcttgttttattgccactagtctctagtcagtgtgttaatcttacaaccagaactcaattaccccctgcatacactaattctttcacacgtggtgtttattaccctgacaaagttttcagatcctcagttttacattcaactcaggacttgttcttacctttcttttccaatgttacttggttccatgctatacatgtctctgggaccaatggtactaagaggtttgataaccctgtcctaccatttaatgatggtgtttattttgcttccactgagaagtctaacataataagaggctggatttttggtactactttagattcgaagacccagtccctacttattgttaataacgctactaatgttgttattaaagtctgtgaatttcaattttgtaatgatccatttttgggtgtttattaccacaaaaacaacaaaagttggatggaaagtgagttcagagtttattctagtgcgaataattgcacttttgaatatgtctctcagccttttcttatggaccttgaaggaaaacagggtaatttcaaaaatcttagggaatttgtgtttaagaatattgatggttattttaaaatatattctaagcacacgcctattaatttagtgcgtgatctccctcagggtttttcggctttagaaccattggtagatttgccaataggtattaacatcactaggtttcaaactttacttgctttacatagaagttatttgactcctggtgattcttcttcaggttggacagctggtgctgcagcttattatgtgggttatcttcaacctaggacttttctattaaaatataatgaaaatggaaccattacagatgctgtagactgtgcacttgaccctctctcagaaacaaagtgtacgttgaaatccttcactgtagaaaaaggaatctatcaaacttctaactttagagtccaaccaacagaatctattgttagatttcctaatattacaaacttgtgcccttttggtgaagtttttaacgccaccagatttgcatctgtttatgcttggaacaggaagagaatcagcaactgtgttgctgattattctgtcctatataattccgcatcattttccacttttaagtgttatggagtgtctcctactaaattaaatgatctctgctttactaatgtctatgcagattcatttgtaattagaggtgatgaagtcagacaaatcgctccagggcaaactggaaagattgctgattataattataaattaccagatgattttacaggctgcgttatagcttggaattctaacaatcttgattctaaggttggtggtaattataattacctgtatagattgtttaggaagtctaatctcaaaccttttgagagagatatttcaactgaaatctatcaggccggtagcacaccttgtaatggtgttgaaggttttaattgttactttcctttacaatcatatggtttccaacccactaatggtgttggttaccaaccatacagagtagtagtactttcttttgaacttctacatgcaccagcaactgtttgtggacctaaaaagtctactaatttggttaaaaacaaatgtgtcaatttcaacttcaatggtttaacaggcacaggtgttcttactgagtctaacaaaaagtttctgcctttccaacaatttggcagagacattgctgacactactgatgctgtccgtgatccacagacacttgagattcttgacattacaccatgttcttttggtggtgtcagtgttataacaccaggaacaaatacttctaaccaggttgctgttctttatcaggatgttaactgcacagaagtccctgttgctattcatgcagatcaacttactcctacttggcgtgtttattctacaggttctaatgtttttcaaacacgtgcaggctgtttaataggggctgaacatgtcaacaactcatatgagtgtgacatacccattggtgcaggtatatgcgctagttatcagactcagactaattctcctcggcgggcacgtagtgtagctagtcaatccatcattgcctacactatgtcacttggtgcagaaaattcagttgcttactctaataactctattgccatacccacaaattttactattagtgttaccacagaaattctaccagtgtctatgaccaagacatcagtagattgtacaatgtacatttgtggtgattcaactgaatgcagcaatcttttgttgcaatatggcagtttttgtacacaattaaaccgtgctttaactggaatagctgttgaacaagacaaaaacacccaagaagtttttgcacaagtcaaacaaatttacaaaacaccaccaattaaagattttggtggttttaatttttcacaaatattaccagatccatcaaaaccaagcaagaggtcatttattgaagatctacttttcaacaaagtgacacttgcagatgctggcttcatcaaacaatatggtgattgccttggtgatattgctgctagagacctcatttgtgcacaaaagtttaacggccttactgttttgccacctttgctcacagatgaaatgattgctcaatacacttctgcactgttagcgggtacaatcacttctggttggacctttggtgcaggtgctgcattacaaataccatttgctatgcaaatggcttataggtttaatggtattggagttacacagaatgttctctatgagaaccaaaaattgattgccaaccaatttaatagtgctattggcaaaattcaagactcactttcttccacagcaagtgcacttggaaaacttcaagatgtggtcaaccaaaatgcacaagctttaaacacgcttgttaaacaacttagctccaattttggtgcaatttcaagtgttttaaatgatatcctttcacgtcttgacaaagttgaggctgaagtgcaaattgataggttgatcacaggcagacttcaaagtttgcagacatatgtgactcaacaattaattagagctgcagaaatcagagcttctgctaatcttgctgctactaaaatgtcagagtgtgtacttggacaatcaaaaagagttgatttttgtggaaagggctatcatcttatgtccttccctcagtcagcacctcatggtgtagtcttcttgcatgtgacttatgtccctgcacaagaaaagaacttcacaactgctcctgccatttgtcatgatggaaaagcacactttcctcgtgaaggtgtctttgtttcaaatggcacacactggtttgtaacacaaaggaatttttatgaaccacaaatcattactacagacaacacatttgtgtctggtaactgtgatgttgtaataggaattgtcaacaacacagtttatgatcctttgcaacctgaattagactcattcaaggaggagttagataaatattttaagaatcatacatcaccagatgttgatttaggtgacatctctggcattaatgcttcagttgtaaacattcaaaaagaaattgaccgcctcaatgaggttgccaagaatttaaatgaatctctcatcgatctccaagaacttggaaagtatgagcagtatataaaatggccatggtacatttggctaggttttatagctggcttgattgccatagtaatggtgacaattatgctttgctgtatgaccagttgctgtagttgtctcaagggctgttgttcttgtggatcctgctgcaaatttgatgaagacgactctgagccagtgctcaaaggagtcaaattacattacacataa

SEQ ID NO: 12 - DNA, 7035 bp, synthetic construct
  source 1..7035: mol_type = other DNA
agattatcaaaaaggatcttcacctagatccttttaaattaaaaatgaagttttaaatcaatctaaagtatatatgagtaaacttggtctgacagttattagaaaaattcatccagcagacgataaaacgcaatacgctggctatccggtgccgcaatgccatacagcaccagaaaacgatccgcccattcgccgcccagttcttccgcaatatcacgggtggccagcgcaatatcctgataacgatccgccacgcccagacggccgcaatcaataaagccgctaaaacggccattttccaccataatgttcggcaggcacgcatcaccatgggtcaccaccagatcttcgccatccggcatgctcgctttcagacgcgcaaacagctctgccggtgccaggccctgatgttcttcatccagatcatcctgatccaccaggcccgcttccatacgggtacgcgcacgttcaatacgatgtttcgcctgatgatcaaacggacaggtcgccgggtccagggtatgcagacgacgcatggcatccgccataatgctcactttttctgccggcgccagatggctagacagcagatcctgacccggcacttcgcccagcagcagccaatcacggcccgcttcggtcaccacatccagcaccgccgcacacggaacaccggtggtggccagccagctcagacgcgccgcttcatcctgcagctcgttcagcgcaccgctcagatcggttttcacaaacagcaccggacgaccctgcgcgctcagacgaaacaccgccgcatcagagcagccaatggtctgctgcgcccaatcatagccaaacagacgttccacccacgctgccgggctacccgcatgcaggccatcctgttcaatcatactcttcctttttcaatattattgaagcatttatcagggttattgtctcatgagcggatacatatttgaatgtatttagaaaaataaacaaataggggttccgcgcacatttccccgaaaagtgccacctaaattgtaagcgttaatattttgttaaaattcgcgttaaatttttgttaaatcagctcattttttaaccaataggccgaaatcggcaaaatcccttataaatcaaaagaatagaccgagatagggttgagtggccgctacagggcgctcccattcgccattcaggctgcgcaactgttgggaagggcgtttcggtgcgggcctcttcgctattacgccagctggcgaaagggggatgtgctgcaaggcgattaagttgggtaacgccagggttttcccagtcacgacgttgtaaaacgacggccagtgagcgcgacgtaatacgactcactatagggcgaattgaaggaaggccgtcaaggccgcatgggaagccctcgaccgtcgattgtccactggtcaacaatagatgacttacaactaatcggaaggtgcagagactcgacgggagctaccctaacgtcaagacgagggtaaagagagagtccaattctcaaagccaataggcagtagcgaaagctgcaagagaatgaaaatccgttgaccttaaacggtcgtgtgggttcaagtccctccacccccacgccggaaacgcaatagccgaaaaacaaaaaacaaaaaaaacaaaaaaaaaaccaaaaaaacaaaacacaacgttactggccgaagccgcttggaataaggccggtgtgcgtttgtctatatgttattttccaccatattgccgtcttttggcaatgtgagggcccggaaacctggccctgtcttcttgacgagcattcctaggggtctttcccctctcgccaaaggaatgcaaggtctgttgaatgtcgtgaaggaagcagttcctctggaagcttcttgaagacaaacaacgtctgtagcgaccctttgcaggcagcggaaccccccacctggcgacaggtgcctctgcggccaaaagccacgtgtataagatacacctgcaaaggcggcacaaccccagtgccacgttgtgagttggatagttgtggaaagagtcaaatggctctcctcaagcgtattcaacaaggggctgaaggatgcccagaaggtaccccattgtatgggatctgatctggggcctcggtgcacatgctttacatgtgtttagtcgaggttaaaaaacgtctaggccccccgaaccacggggacgtggttttcctttgaaaaacacgatgataatagccaccatgtttgtttttcttgttttattgccactagtctctagtcagtgtgttaatcttacaaccagaactcaattaccccctgcatacactaattctttcacacgtggtgtttattaccctgacaaagttttcagatcctcagttttacattcaactcaggacttgttcttacctttcttttccaatgttacttggttccatgctatacatgtctctgggaccaatggtactaagaggtttgataaccctgtcctaccatttaatgatggtgtttattttgcttccactgagaagtctaacataataagaggctggatttttggtactactttagattcgaagacccagtccctacttattgttaataacgctactaatgttgttattaaagtctgtgaatttcaattttgtaatgatccatttttgggtgtttattaccacaaaaacaacaaaagttggatggaaagtgagttcagagtttattctagtgcgaataattgcacttttgaatatgtctctcagccttttcttatggaccttgaaggaaaacagggtaatttcaaaaatcttagggaatttgtgtttaagaatattgatggttattttaaaatatattctaagcacacgcctattaatttagtgcgtgatctccctcagggtttttcggctttagaaccattggtagatttgccaataggtattaacatcactaggtttcaaactttacttgctttacatagaagttatttgactcctggtgattcttcttcaggttggacagctggtgctgcagcttattatgtgggttatcttcaacctaggacttttctattaaaatataatgaaaatggaaccattacagatgctgtagactgtgcacttgaccctctctcagaaacaaagtgtacgttgaaatccttcactgtagaaaaaggaatctatcaaacttctaactttagagtccaaccaacagaatctattgttagatttcctaatattacaaacttgtgcccttttggtgaagtttttaacgccaccagatttgcatctgtttatgcttggaacaggaagagaatcagcaactgtgttgctgattattctgtcctatataattccgcatcattttccacttttaagtgttatggagtgtctcctactaaattaaatgatctctgctttactaatgtctatgcagattcatttgtaattagaggtgatgaagtcagacaaatcgctccagggcaaactggaaagattgctgattataattataaattaccagatgattttacaggctgcgttatagcttggaattctaacaatcttgattctaaggttggtggtaattataattacctgtatagattgtttaggaagtctaatctcaaaccttttgagagagatatttcaactgaaatctatcaggccggtagcacaccttgtaatggtgttgaaggttttaattgttactttcctttacaatcatatggtttccaacccactaatggtgttggttaccaaccatacagagtagtagtactttcttttgaacttctacatgcaccagcaactgtttgtggacctaaaaagtctactaatttggttaaaaacaaatgtgtcaatttcaacttcaatggtttaacaggcacaggtgttcttactgagtctaacaaaaagtttctgcctttccaacaatttggcagagacattgctgacactactgatgctgtccgtgatccacagacacttgagattcttgacattacaccatgttcttttggtggtgtcagtgttataacaccaggaacaaatacttctaaccaggttgctgttctttatcaggatgttaactgcacagaagtccctgttgctattcatgcagatcaacttactcctacttggcgtgtttattctacaggttctaatgtttttcaaacacgtgcaggctgtttaataggggctgaacatgtcaacaactcatatgagtgtgacatacccattggtgcaggtatatgcgctagttatcagactcagactaattctcctggcagcgccagcagtgtagctagtcaatccatcattgcctacactatgtcacttggtgcagaaaattcagttgcttactctaataactctattgccatacccacaaattttactattagtgttaccacagaaattctaccagtgtctatgaccaagacatcagtagattgtacaatgtacatttgtggtgattcaactgaatgcagcaatcttttgttgcaatatggcagtttttgtacacaattaaaccgtgctttaactggaatagctgttgaacaagacaaaaacacccaagaagtttttgcacaagtcaaacaaatttacaaaacaccaccaattaaagattttggtggttttaatttttcacaaatattaccagatccatcaaaaccaagcaagaggtcatttattgaagatctacttttcaacaaagtgacacttgcagatgctggcttcatcaaacaatatggtgattgccttggtgatattgctgctagggacctcatttgtgcacaaaagtttaacggccttactgttttgccacctttgctcacagatgaaatgattgctcaatacacttctgcactgttagcgggtacaatcacttctggttggacctttggtgcaggtgctgcattacaaataccatttgctatgcaaatggcttataggtttaatggtattggagttacacagaatgttctctatgagaaccaaaaattgattgccaaccaatttaatagtgctattggcaaaattcaagactcactttcttccacagcaagtgcacttggaaaacttcaagatgtggtcaaccaaaatgcacaagctttaaacacgcttgttaaacaacttagctccaattttggtgcaatttcaagtgttttaaatgatatcctttcacgtcttgaccctcccgaggctgaagtgcaaattgataggttgatcacaggcagacttcaaagtttgcagacatatgtgactcaacaattaattagagctgcagaaatcagagcttctgctaatcttgctgctactaaaatgtcagagtgtgtacttggacaatcaaaaagagttgatttttgtggaaagggctatcatcttatgtccttccctcagtcagcacctcatggtgtagtcttcttgcatgtgacttatgtccctgcacaagaaaagaacttcacaactgctcctgccatttgtcatgatggaaaagcacactttcctcgtgaaggtgtctttgtttcaaatggcacacactggtttgtaacacaaaggaatttttatgaaccacaaatcattactacagacaacacatttgtgtctggtaactgtgatgttgtaataggaattgtcaacaacacagtttatgatcctttgcaacctgaattagactcattcaaggaggagttagataaatattttaagaatcatacatcaccagatgttgatttaggtgacatctctggcattaatgcttcagttgtaaacattcaaaaagaaattgaccgcctcaatgaggttgccaagaatttaaatgaatctctcatcgatctccaagaacttggaaagtatgagcaggggtatatccctgaagcccccagggacggccaggcttacgtcagaaaggatggagagtgggtgctcttgagcaccttcctgtaaaaaaaacaaaaaacaaaacggctattatgcgttaccggcgagacgctacggacttaaataattgagccttaaagaagaaattctttaagtggatgctctcaaactcagggaaacctaaatctagttatagacaaggcaatcctgagccaagccgaagtagtaattagtaagaccagtggacaatcgacggataacagcatatctagctgggcctcatgggccttcctttcactgcccgctttccagtcgggaaacctgtcgtgccagctgcattaacatggtcatagctgtttccttgcgtattgggcgctctccgcttcctcgctcactgactcgctgcgctcggtcgttcgggtaaagcctggggtgcctaatgagcaaaaggccagcaaaaggccaggaaccgtaaaaaggccgcgttgctggcgtttttccataggctccgcccccctgacgagcatcacaaaaatcgacgctcaagtcagaggtggcgaaacccgacaggactataaagataccaggcgtttccccctggaagctccctcgtgcgctctcctgttccgaccctgccgcttaccggatacctgtccgcctttctcccttcgggaagcgtggcgctttctcatagctcacgctgtaggtatctcagttcggtgtaggtcgttcgctccaagctgggctgtgtgcacgaaccccccgttcagcccgaccgctgcgccttatccggtaactatcgtcttgagtccaacccggtaagacacgacttatcgccactggcagcagccactggtaacaggattagcagagcgaggtatgtaggcggtgctacagagttcttgaagtggtggcctaactacggctacactagaagaacagtatttggtatctgcgctctgctgaagccagttaccttcggaaaaagagttggtagctcttgatccggcaaacaaaccaccgctggtagcggtggtttttttgtttgcaagcagcagattacgcgcagaaaaaaaggatctcaagaagatcctttgatcttttctacggggtctgacgctcagtggaacgaaaactcacgttaagggattttggtcatg

SEQ ID NO: 13 - DNA, 3708 bp, synthetic construct
  source 1..3708: mol_type = other DNA
atgtttgtttttcttgttttattgccactagtctctagtcagtgtgttaatcttacaaccagaactcaattaccccctgcatacactaattctttcacacgtggtgtttattaccctgacaaagttttcagatcctcagttttacattcaactcaggacttgttcttacctttcttttccaatgttacttggttccatgctatacatgtctctgggaccaatggtactaagaggtttgataaccctgtcctaccatttaatgatggtgtttattttgcttccactgagaagtctaacataataagaggctggatttttggtactactttagattcgaagacccagtccctacttattgttaataacgctactaatgttgttattaaagtctgtgaatttcaattttgtaatgatccatttttgggtgtttattaccacaaaaacaacaaaagttggatggaaagtgagttcagagtttattctagtgcgaataattgcacttttgaatatgtctctcagccttttcttatggaccttgaaggaaaacagggtaatttcaaaaatcttagggaatttgtgtttaagaatattgatggttattttaaaatatattctaagcacacgcctattaatttagtgcgtgatctccctcagggtttttcggctttagaaccattggtagatttgccaataggtattaacatcactaggtttcaaactttacttgctttacatagaagttatttgactcctggtgattcttcttcaggttggacagctggtgctgcagcttattatgtgggttatcttcaacctaggacttttctattaaaatataatgaaaatggaaccattacagatgctgtagactgtgcacttgaccctctctcagaaacaaagtgtacgttgaaatccttcactgtagaaaaaggaatctatcaaacttctaactttagagtccaaccaacagaatctattgttagatttcctaatattacaaacttgtgcccttttggtgaagtttttaacgccaccagatttgcatctgtttatgcttggaacaggaagagaatcagcaactgtgttgctgattattctgtcctatataattccgcatcattttccacttttaagtgttatggagtgtctcctactaaattaaatgatctctgctttactaatgtctatgcagattcatttgtaattagaggtgatgaagtcagacaaatcgctccagggcaaactggaaagattgctgattataattataaattaccagatgattttacaggctgcgttatagcttggaattctaacaatcttgattctaaggttggtggtaattataattacctgtatagattgtttaggaagtctaatctcaaaccttttgagagagatatttcaactgaaatctatcaggccggtagcacaccttgtaatggtgttgaaggttttaattgttactttcctttacaatcatatggtttccaacccactaatggtgttggttaccaaccatacagagtagtagtactttcttttgaacttctacatgcaccagcaactgtttgtggacctaaaaagtctactaatttggttaaaaacaaatgtgtcaatttcaacttcaatggtttaacaggcacaggtgttcttactgagtctaacaaaaagtttctgcctttccaacaatttggcagagacattgctgacactactgatgctgtccgtgatccacagacacttgagattcttgacattacaccatgttcttttggtggtgtcagtgttataacaccaggaacaaatacttctaaccaggttgctgttctttatcaggatgttaactgcacagaagtccctgttgctattcatgcagatcaacttactcctacttggcgtgtttattctacaggttctaatgtttttcaaacacgtgcaggctgtttaataggggctgaacatgtcaacaactcatatgagtgtgacatacccattggtgcaggtatatgcgctagttatcagactcagactaattctcctggcagcgccagcagtgtagctagtcaatccatcattgcctacactatgtcacttggtgcagaaaattcagttgcttactctaataactctattgccatacccacaaattttactattagtgttaccacagaaattctaccagtgtctatgaccaagacatcagtagattgtacaatgtacatttgtggtgattcaactgaatgcagcaatcttttgttgcaatatggcagtttttgtacacaattaaaccgtgctttaactggaatagctgttgaacaagacaaaaacacccaagaagtttttgcacaagtcaaacaaatttacaaaacaccaccaattaaagattttggtggttttaatttttcacaaatattaccagatccatcaaaaccaagcaagaggtcatttattgaagatctacttttcaacaaagtgacacttgcagatgctggcttcatcaaacaatatggtgattgccttggtgatattgctgctagggacctcatttgtgcacaaaagtttaacggccttactgttttgccacctttgctcacagatgaaatgattgctcaatacacttctgcactgttagcgggtacaatcacttctggttggacctttggtgcaggtgctgcattacaaataccatttgctatgcaaatggcttataggtttaatggtattggagttacacagaatgttctctatgagaaccaaaaattgattgccaaccaatttaatagtgctattggcaaaattcaagactcactttcttccacagcaagtgcacttggaaaacttcaagatgtggtcaaccaaaatgcacaagctttaaacacgcttgttaaacaacttagctccaattttggtgcaatttcaagtgttttaaatgatatcctttcacgtcttgaccctcccgaggctgaagtgcaaattgataggttgatcacaggcagacttcaaagtttgcagacatatgtgactcaacaattaattagagctgcagaaatcagagcttctgctaatcttgctgctactaaaatgtcagagtgtgtacttggacaatcaaaaagagttgatttttgtggaaagggctatcatcttatgtccttccctcagtcagcacctcatggtgtagtcttcttgcatgtgacttatgtccctgcacaagaaaagaacttcacaactgctcctgccatttgtcatgatggaaaagcacactttcctcgtgaaggtgtctttgtttcaaatggcacacactggtttgtaacacaaaggaatttttatgaaccacaaatcattactacagacaacacatttgtgtctggtaactgtgatgttgtaataggaattgtcaacaacacagtttatgatcctttgcaacctgaattagactcattcaaggaggagttagataaatattttaagaatcatacatcaccagatgttgatttaggtgacatctctggcattaatgcttcagttgtaaacattcaaaaagaaattgaccgcctcaatgaggttgccaagaatttaaatgaatctctcatcgatctccaagaacttggaaagtatgagcaggggtatatccctgaagcccccagggacggccaggcttacgtcagaaaggatggagagtgggtgctcttgagcaccttcctgtaa

SEQ ID NO: 14 - DNA, 7149 bp, synthetic construct
  source 1..7149: mol_type = other DNA
agattatcaaaaaggatcttcacctagatccttttaaattaaaaatgaagttttaaatcaatctaaagtatatatgagtaaacttggtctgacagttattagaaaaattcatccagcagacgataaaacgcaatacgctggctatccggtgccgcaatgccatacagcaccagaaaacgatccgcccattcgccgcccagttcttccgcaatatcacgggtggccagcgcaatatcctgataacgatccgccacgcccagacggccgcaatcaataaagccgctaaaacggccattttccaccataatgttcggcaggcacgcatcaccatgggtcaccaccagatcttcgccatccggcatgctcgctttcagacgcgcaaacagctctgccggtgccaggccctgatgttcttcatccagatcatcctgatccaccaggcccgcttccatacgggtacgcgcacgttcaatacgatgtttcgcctgatgatcaaacggacaggtcgccgggtccagggtatgcagacgacgcatggcatccgccataatgctcactttttctgccggcgccagatggctagacagcagatcctgacccggcacttcgcccagcagcagccaatcacggcccgcttcggtcaccacatccagcaccgccgcacacggaacaccggtggtggccagccagctcagacgcgccgcttcatcctgcagctcgttcagcgcaccgctcagatcggttttcacaaacagcaccggacgaccctgcgcgctcagacgaaacaccgccgcatcagagcagccaatggtctgctgcgcccaatcatagccaaacagacgttccacccacgctgccgggctacccgcatgcaggccatcctgttcaatcatactcttcctttttcaatattattgaagcatttatcagggttattgtctcatgagcggatacatatttgaatgtatttagaaaaataaacaaataggggttccgcgcacatttccccgaaaagtgccacctaaattgtaagcgttaatattttgttaaaattcgcgttaaatttttgttaaatcagctcattttttaaccaataggccgaaatcggcaaaatcccttataaatcaaaagaatagaccgagatagggttgagtggccgctacagggcgctcccattcgccattcaggctgcgcaactgttgggaagggcgtttcggtgcgggcctcttcgctattacgccagctggcgaaagggggatgtgctgcaaggcgattaagttgggtaacgccagggttttcccagtcacgacgttgtaaaacgacggccagtgagcgcgacgtaatacgactcactatagggcgaattgaaggaaggccgtcaaggccgcatgggaagccctcgaccgtcgattgtccactggtcaacaatagatgacttacaactaatcggaaggtgcagagactcgacgggagctaccctaacgtcaagacgagggtaaagagagagtccaattctcaaagccaataggcagtagcgaaagctgcaagagaatgaaaatccgttgaccttaaacggtcgtgtgggttcaagtccctccacccccacgccggaaacgcaatagccgaaaaacaaaaaacaaaaaaaacaaaaaaaaaaccaaaaaaacaaaacacaacgttactggccgaagccgcttggaataaggccggtgtgcgtttgtctatatgttattttccaccatattgccgtcttttggcaatgtgagggcccggaaacctggccctgtcttcttgacgagcattcctaggggtctttcccctctcgccaaaggaatgcaaggtctgttgaatgtcgtgaaggaagcagttcctctggaagcttcttgaagacaaacaacgtctgtagcgaccctttgcaggcagcggaaccccccacctggcgacaggtgcctctgcggccaaaagccacgtgtataagatacacctgcaaaggcggcacaaccccagtgccacgttgtgagttggatagttgtggaaagagtcaaatggctctcctcaagcgtattcaacaaggggctgaaggatgcccagaaggtaccccattgtatgggatctgatctggggcctcggtgcacatgctttacatgtgtttagtcgaggttaaaaaacgtctaggccccccgaaccacggggacgtggttttcctttgaaaaacacgatgataatagccaccatgtttgtttttcttgttttattgccactagtctctagtcagtgtgttaatcttacaaccagaactcaattaccccctgcatacactaattctttcacacgtggtgtttattaccctgacaaagttttcagatcctcagttttacattcaactcaggacttgttcttacctttcttttccaatgttacttggttccatgctatacatgtctctgggaccaatggtactaagaggtttgataaccctgtcctaccatttaatgatggtgtttattttgcttccactgagaagtctaacataataagaggctggatttttggtactactttagattcgaagacccagtccctacttattgttaataacgctactaatgttgttattaaagtctgtgaatttcaattttgtaatgatccatttttgggtgtttattaccacaaaaacaacaaaagttggatggaaagtgagttcagagtttattctagtgcgaataattgcacttttgaatatgtctctcagccttttcttatggaccttgaaggaaaacagggtaatttcaaaaatcttagggaatttgtgtttaagaatattgatggttattttaaaatatattctaagcacacgcctattaatttagtgcgtgatctccctcagggtttttcggctttagaaccattggtagatttgccaataggtattaacatcactaggtttcaaactttacttgctttacatagaagttatttgactcctggtgattcttcttcaggttggacagctggtgctgcagcttattatgtgggttatcttcaacctaggacttttctattaaaatataatgaaaatggaaccattacagatgctgtagactgtgcacttgaccctctctcagaaacaaagtgtacgttgaaatccttcactgtagaaaaaggaatctatcaaacttctaactttagagtccaaccaacagaatctattgttagatttcctaatattacaaacttgtgcccttttggtgaagtttttaacgccaccagatttgcatctgtttatgcttggaacaggaagagaatcagcaactgtgttgctgattattctgtcctatataattccgcatcattttccacttttaagtgttatggagtgtctcctactaaattaaatgatctctgctttactaatgtctatgcagattcatttgtaattagaggtgatgaagtcagacaaatcgctccagggcaaactggaaagattgctgattataattataaattaccagatgattttacaggctgcgttatagcttggaattctaacaatcttgattctaaggttggtggtaattataattacctgtatagattgtttaggaagtctaatctcaaaccttttgagagagatatttcaactgaaatctatcaggccggtagcacaccttgtaatggtgttgaaggttttaattgttactttcctttacaatcatatggtttccaacccactaatggtgttggttaccaaccatacagagtagtagtactttcttttgaacttctacatgcaccagcaactgtttgtggacctaaaaagtctactaatttggttaaaaacaaatgtgtcaatttcaacttcaatggtttaacaggcacaggtgttcttactgagtctaacaaaaagtttctgcctttccaacaatttggcagagacattgctgacactactgatgctgtccgtgatccacagacacttgagattcttgacattacaccatgttcttttggtggtgtcagtgttataacaccaggaacaaatacttctaaccaggttgctgttctttatcaggatgttaactgcacagaagtccctgttgctattcatgcagatcaacttactcctacttggcgtgtttattctacaggttctaatgtttttcaaacacgtgcaggctgtttaataggggctgaacatgtcaacaactcatatgagtgtgacatacccattggtgcaggtatatgcgctagttatcagactcagactaattctcctggcagcgccagcagtgtagctagtcaatccatcattgcctacactatgtcacttggtgcagaaaattcagttgcttactctaataactctattgccatacccacaaattttactattagtgttaccacagaaattctaccagtgtctatgaccaagacatcagtagattgtacaatgtacatttgtggtgattcaactgaatgcagcaatcttttgttgcaatatggcagtttttgtacacaattaaaccgtgctttaactggaatagctgttgaacaagacaaaaacacccaagaagtttttgcacaagtcaaacaaatttacaaaacaccaccaattaaagattttggtggttttaatttttcacaaatattaccagatccatcaaaaccaagcaagaggtcatttattgaagatctacttttcaacaaagtgacacttgcagatgctggcttcatcaaacaatatggtgattgccttggtgatattgctgctagggacctcatttgtgcacaaaagtttaacggccttactgttttgccacctttgctcacagatgaaatgattgctcaatacacttctgcactgttagcgggtacaatcacttctggttggacctttggtgcaggtgctgcattacaaataccatttgctatgcaaatggcttataggtttaatggtattggagttacacagaatgttctctatgagaaccaaaaattgattgccaaccaatttaatagtgctattggcaaaattcaagactcactttcttccacagcaagtgcacttggaaaacttcaagatgtggtcaaccaaaatgcacaagctttaaacacgcttgttaaacaacttagctccaattttggtgcaatttcaagtgttttaaatgatatcctttcacgtcttgaccctcccgaggctgaagtgcaaattgataggttgatcacaggcagacttcaaagtttgcagacatatgtgactcaacaattaattagagctgcagaaatcagagcttctgctaatcttgctgctactaaaatgtcagagtgtgtacttggacaatcaaaaagagttgatttttgtggaaagggctatcatcttatgtccttccctcagtcagcacctcatggtgtagtcttcttgcatgtgacttatgtccctgcacaagaaaagaacttcacaactgctcctgccatttgtcatgatggaaaagcacactttcctcgtgaaggtgtctttgtttcaaatggcacacactggtttgtaacacaaaggaatttttatgaaccacaaatcattactacagacaacacatttgtgtctggtaactgtgatgttgtaataggaattgtcaacaacacagtttatgatcctttgcaacctgaattagactcattcaaggaggagttagataaatattttaagaatcatacatcaccagatgttgatttaggtgacatctctggcattaatgcttcagttgtaaacattcaaaaagaaattgaccgcctcaatgaggttgccaagaatttaaatgaatctctcatcgatctccaagaacttggaaagtatgagcagtatataaaatggccatggtacatttggctaggttttatagctggcttgattgccatagtaatggtgacaattatgctttgctgtatgaccagttgctgtagttgtctcaagggctgttgttcttgtggatcctgctgcaaatttgatgaagacgactctgagccagtgctcaaaggagtcaaattacattacacataaaaaaaacaaaaaacaaaacggctattatgcgttaccggcgagacgctacggacttaaataattgagccttaaagaagaaattctttaagtggatgctctcaaactcagggaaacctaaatctagttatagacaaggcaatcctgagccaagccgaagtagtaattagtaagaccagtggacaatcgacggataacagcatatctagctgggcctcatgggccttcctttcactgcccgctttccagtcgggaaacctgtcgtgccagctgcattaacatggtcatagctgtttccttgcgtattgggcgctctccgcttcctcgctcactgactcgctgcgctcggtcgttcgggtaaagcctggggtgcctaatgagcaaaaggccagcaaaaggccaggaaccgtaaaaaggccgcgttgctggcgtttttccataggctccgcccccctgacgagcatcacaaaaatcgacgctcaagtcagaggtggcgaaacccgacaggactataaagataccaggcgtttccccctggaagctccctcgtgcgctctcctgttccgaccctgccgcttaccggatacctgtccgcctttctcccttcgggaagcgtggcgctttctcatagctcacgctgtaggtatctcagttcggtgtaggtcgttcgctccaagctgggctgtgtgcacgaaccccccgttcagcccgaccgctgcgccttatccggtaactatcgtcttgagtccaacccggtaagacacgacttatcgccactggcagcagccactggtaacaggattagcagagcgaggtatgtaggcggtgctacagagttcttgaagtggtggcctaactacggctacactagaagaacagtatttggtatctgcgctctgctgaagccagttaccttcggaaaaagagttggtagctcttgatccggcaaacaaaccaccgctggtagcggtggtttttttgtttgcaagcagcagattacgcgcagaaaaaaaggatctcaagaagatcctttgatcttttctacggggtctgacgctcagtggaacgaaaactcacgttaagggattttggtcatg

SEQ ID NO: 15 - DNA, 3822 bp, synthetic construct
  source 1..3822: mol_type = other DNA
atgtttgtttttcttgttttattgccactagtctctagtcagtgtgttaatcttacaaccagaactcaattaccccctgcatacactaattctttcacacgtggtgtttattaccctgacaaagttttcagatcctcagttttacattcaactcaggacttgttcttacctttcttttccaatgttacttggttccatgctatacatgtctctgggaccaatggtactaagaggtttgataaccctgtcctaccatttaatgatggtgtttattttgcttccactgagaagtctaacataataagaggctggatttttggtactactttagattcgaagacccagtccctacttattgttaataacgctactaatgttgttattaaagtctgtgaatttcaattttgtaatgatccatttttgggtgtttattaccacaaaaacaacaaaagttggatggaaagtgagttcagagtttattctagtgcgaataattgcacttttgaatatgtctctcagccttttcttatggaccttgaaggaaaacagggtaatttcaaaaatcttagggaatttgtgtttaagaatattgatggttattttaaaatatattctaagcacacgcctattaatttagtgcgtgatctccctcagggtttttcggctttagaaccattggtagatttgccaataggtattaacatcactaggtttcaaactttacttgctttacatagaagttatttgactcctggtgattcttcttcaggttggacagctggtgctgcagcttattatgtgggttatcttcaacctaggacttttctattaaaatataatgaaaatggaaccattacagatgctgtagactgtgcacttgaccctctctcagaaacaaagtgtacgttgaaatccttcactgtagaaaaaggaatctatcaaacttctaactttagagtccaaccaacagaatctattgttagatttcctaatattacaaacttgtgcccttttggtgaagtttttaacgccaccagatttgcatctgtttatgcttggaacaggaagagaatcagcaactgtgttgctgattattctgtcctatataattccgcatcattttccacttttaagtgttatggagtgtctcctactaaattaaatgatctctgctttactaatgtctatgcagattcatttgtaattagaggtgatgaagtcagacaaatcgctccagggcaaactggaaagattgctgattataattataaattaccagatgattttacaggctgcgttatagcttggaattctaacaatcttgattctaaggttggtggtaattataattacctgtatagattgtttaggaagtctaatctcaaaccttttgagagagatatttcaactgaaatctatcaggccggtagcacaccttgtaatggtgttgaaggttttaattgttactttcctttacaatcatatggtttccaacccactaatggtgttggttaccaaccatacagagtagtagtactttcttttgaacttctacatgcaccagcaactgtttgtggacctaaaaagtctactaatttggttaaaaacaaatgtgtcaatttcaacttcaatggtttaacaggcacaggtgttcttactgagtctaacaaaaagtttctgcctttccaacaatttggcagagacattgctgacactactgatgctgtccgtgatccacagacacttgagattcttgacattacaccatgttcttttggtggtgtcagtgttataacaccaggaacaaatacttctaaccaggttgctgttctttatcaggatgttaactgcacagaagtccctgttgctattcatgcagatcaacttactcctacttggcgtgtttattctacaggttctaatgtttttcaaacacgtgcaggctgtttaataggggctgaacatgtcaacaactcatatgagtgtgacatacccattggtgcaggtatatgcgctagttatcagactcagactaattctcctggcagcgccagcagtgtagctagtcaatccatcattgcctacactatgtcacttggtgcagaaaattcagttgcttactctaataactctattgccatacccacaaattttactattagtgttaccacagaaattctaccagtgtctatgaccaagacatcagtagattgtacaatgtacatttgtggtgattcaactgaatgcagcaatcttttgttgcaatatggcagtttttgtacacaattaaaccgtgctttaactggaatagctgttgaacaagacaaaaacacccaagaagtttttgcacaagtcaaacaaatttacaaaacaccaccaattaaagattttggtggttttaatttttcacaaatattaccagatccatcaaaaccaagcaagaggtcatttattgaagatctacttttcaacaaagtgacacttgcagatgctggcttcatcaaacaatatggtgattgccttggtgatattgctgctagggacctcatttgtgcacaaaagtttaacggccttactgttttgccacctttgctcacagatgaaatgattgctcaatacacttctgcactgttagcgggtacaatcacttctggttggacctttggtgcaggtgctgcattacaaataccatttgctatgcaaatggcttataggtttaatggtattggagttacacagaatgttctctatgagaaccaaaaattgattgccaaccaatttaatagtgctattggcaaaattcaagactcactttcttccacagcaagtgcacttggaaaacttcaagatgtggtcaaccaaaatgcacaagctttaaacacgcttgttaaacaacttagctccaattttggtgcaatttcaagtgttttaaatgatatcctttcacgtcttgaccctcccgaggctgaagtgcaaattgataggttgatcacaggcagacttcaaagtttgcagacatatgtgactcaacaattaattagagctgcagaaatcagagcttctgctaatcttgctgctactaaaatgtcagagtgtgtacttggacaatcaaaaagagttgatttttgtggaaagggctatcatcttatgtccttccctcagtcagcacctcatggtgtagtcttcttgcatgtgacttatgtccctgcacaagaaaagaacttcacaactgctcctgccatttgtcatgatggaaaagcacactttcctcgtgaaggtgtctttgtttcaaatggcacacactggtttgtaacacaaaggaatttttatgaaccacaaatcattactacagacaacacatttgtgtctggtaactgtgatgttgtaataggaattgtcaacaacacagtttatgatcctttgcaacctgaattagactcattcaaggaggagttagataaatattttaagaatcatacatcaccagatgttgatttaggtgacatctctggcattaatgcttcagttgtaaacattcaaaaagaaattgaccgcctcaatgaggttgccaagaatttaaatgaatctctcatcgatctccaagaacttggaaagtatgagcagtatataaaatggccatggtacatttggctaggttttatagctggcttgattgccatagtaatggtgacaattatgctttgctgtatgaccagttgctgtagttgtctcaagggctgttgttcttgtggatcctgctgcaaatttgatgaagacgactctgagccagtgctcaaaggagtcaaattacattacacataa

SEQ ID NO: 16 - DNA, 7038 bp, synthetic construct
  source 1..7038: mol_type = other DNA
agattatcaaaaaggatcttcacctagatccttttaaattaaaaatgaagttttaaatcaatctaaagtatatatgagtaaacttggtctgacagttattagaaaaattcatccagcagacgataaaacgcaatacgctggctatccggtgccgcaatgccatacagcaccagaaaacgatccgcccattcgccgcccagttcttccgcaatatcacgggtggccagcgcaatatcctgataacgatccgccacgcccagacggccgcaatcaataaagccgctaaaacggccattttccaccataatgttcggcaggcacgcatcaccatgggtcaccaccagatcttcgccatccggcatgctcgctttcagacgcgcaaacagctctgccggtgccaggccctgatgttcttcatccagatcatcctgatccaccaggcccgcttccatacgggtacgcgcacgttcaatacgatgtttcgcctgatgatcaaacggacaggtcgccgggtccagggtatgcagacgacgcatggcatccgccataatgctcactttttctgccggcgccagatggctagacagcagatcctgacccggcacttcgcccagcagcagccaatcacggcccgcttcggtcaccacatccagcaccgccgcacacggaacaccggtggtggccagccagctcagacgcgccgcttcatcctgcagctcgttcagcgcaccgctcagatcggttttcacaaacagcaccggacgaccctgcgcgctcagacgaaacaccgccgcatcagagcagccaatggtctgctgcgcccaatcatagccaaacagacgttccacccacgctgccgggctacccgcatgcaggccatcctgttcaatcatactcttcctttttcaatattattgaagcatttatcagggttattgtctcatgagcggatacatatttgaatgtatttagaaaaataaacaaataggggttccgcgcacatttccccgaaaagtgccacctaaattgtaagcgttaatattttgttaaaattcgcgttaaatttttgttaaatcagctcattttttaaccaataggccgaaatcggcaaaatcccttataaatcaaaagaatagaccgagatagggttgagtggccgctacagggcgctcccattcgccattcaggctgcgcaactgttgggaagggcgtttcggtgcgggcctcttcgctattacgccagctggcgaaagggggatgtgctgcaaggcgattaagttgggtaacgccagggttttcccagtcacgacgttgtaaaacgacggccagtgagcgcgacgtaatacgactcactatagggcgaattgaaggaaggccgtcaaggccgcatgggaagccctcgaccgtcgattgtccactggtcaacaatagatgacttacaactaatcggaaggtgcagagactcgacgggagctaccctaacgtcaagacgagggtaaagagagagtccaattctcaaagccaataggcagtagcgaaagctgcaagagaatgaaaatccgttgaccttaaacggtcgtgtgggttcaagtccctccacccccacgccggaaacgcaatagccgaaaaacaaaaaacaaaaaaaacaaaaaaaaaaccaaaaaaacaaaacacaacgttactggccgaagccgcttggaataaggccggtgtgcgtttgtctatatgttattttccaccatattgccgtcttttggcaatgtgagggcccggaaacctggccctgtcttcttgacgagcattcctaggggtctttcccctctcgccaaaggaatgcaaggtctgttgaatgtcgtgaaggaagcagttcctctggaagcttcttgaagacaaacaacgtctgtagcgaccctttgcaggcagcggaaccccccacctggcgacaggtgcctctgcggccaaaagccacgtgtataagatacacctgcaaaggcggcacaaccccagtgccacgttgtgagttggatagttgtggaaagagtcaaatggctctcctcaagcgtattcaacaaggggctgaaggatgcccagaaggtaccccattgtatgggatctgatctggggcctcggtgcacatgctttacatgtgtttagtcgaggttaaaaaacgtctaggccccccgaaccacggggacgtggttttcctttgaaaaacacgatgataatagccaccatgtttgtttttcttgttttattgccactagtctctagtcagtgtgttaatcttacaaccagaactcaattaccccctgcatacactaattctttcacacgtggtgtttattaccctgacaaagttttcagatcctcagttttacattcaactcaggacttgttcttacctttcttttccaatgttacttggttccatgctatacatgtctctgggaccaatggtactaagaggtttgataaccctgtcctaccatttaatgatggtgtttattttgcttccactgagaagtctaacataataagaggctggatttttggtactactttagattcgaagacccagtccctacttattgttaataacgctactaatgttgttattaaagtctgtgaatttcaattttgtaatgatccatttttgggtgtttattaccacaaaaacaacaaaagttggatggaaagtgagttcagagtttattctagtgcgaataattgcacttttgaatatgtctctcagccttttcttatggaccttgaaggaaaacagggtaatttcaaaaatcttagggaatttgtgtttaagaatattgatggttattttaaaatatattctaagcacacgcctattaatttagtgcgtgatctccctcagggtttttcggctttagaaccattggtagatttgccaataggtattaacatcactaggtttcaaactttacttgctttacatagaagttatttgactcctggtgattcttcttcaggttggacagctggtgctgcagcttattatgtgggttatcttcaacctaggacttttctattaaaatataatgaaaatggaaccattacagatgctgtagactgtgcacttgaccctctctcagaaacaaagtgtacgttgaaatccttcactgtagaaaaaggaatctatcaaacttctaactttagagtccaaccaacagaatctattgttagatttcctaatattacaaacttgtgcccttttggtgaagtttttaacgccaccagatttgcatctgtttatgcttggaacaggaagagaatcagcaactgtgttgctgattattctgtcctatataattccgcatcattttccacttttaagtgttatggagtgtctcctactaaattaaatgatctctgctttactaatgtctatgcagattcatttgtaattagaggtgatgaagtcagacaaatcgctccagggcaaactggaaagattgctgattataattataaattaccagatgattttacaggctgcgttatagcttggaattctaacaatcttgattctaaggttggtggtaattataattacctgtatagattgtttaggaagtctaatctcaaaccttttgagagagatatttcaactgaaatctatcaggccggtagcacaccttgtaatggtgttgaaggttttaattgttactttcctttacaatcatatggtttccaacccactaatggtgttggttaccaaccatacagagtagtagtactttcttttgaacttctacatgcaccagcaactgtttgtggacctaaaaagtctactaatttggttaaaaacaaatgtgtcaatttcaacttcaatggtttaacaggcacaggtgttcttactgagtctaacaaaaagtttctgcctttccaacaatttggcagagacattgctgacactactgatgctgtccgtgatccacagacacttgagattcttgacattacaccatgttcttttggtggtgtcagtgttataacaccaggaacaaatacttctaaccaggttgctgttctttatcaggatgttaactgcacagaagtccctgttgctattcatgcagatcaacttactcctacttggcgtgtttattctacaggttctaatgtttttcaaacacgtgcaggctgtttaataggggctgaacatgtcaacaactcatatgagtgtgacatacccattggtgcaggtatatgcgctagttatcagactcagactaattctcctggcagcgccagcagtgtagctagtcaatccatcattgcctacactatgtcacttggtgcagaaaattcagttgcttactctaataactctattgccatacccacaaattttactattagtgttaccacagaaattctaccagtgtctatgaccaagacatcagtagattgtacaatgtacatttgtggtgattcaactgaatgcagcaatcttttgttgcaatatggcagtttttgtacacaattaaaccgtgctttaactggaatagctgttgaacaagacaaaaacacccaagaagtttttgcacaagtcaaacaaatttacaaaacaccaccaattaaagattttggtggttttaatttttcacaaatattaccagatccatcaaaaccaagcaagaggtcatttattgaagatctacttttcaacaaagtgacacttgcagatgctggcttcatcaaacaatatggtgattgccttggtgatattgctgctagggacctcatttgtgcacaaaagtttaacggccttactgttttgccacctttgctcacagatgaaatgattgctcaatacacttctgcactgttagcgggtacaatcacttctggttggacctttggtgcaggtgctgcattacaaataccatttgctatgcaaatggcttataggtttaatggtattggagttacacagaatgttctctatgagaaccaaaaattgattgccaaccaatttaatagtgctattggcaaaattcaagactcactttcttccacagcaagtgcacttggaaaacttcaagatgtggtcaaccaaaatgcacaagctttaaacacgcttgttaaacaacttagctccaattttggtgcaatttcaagtgttttaaatgatatcctttcacgtcttgaccctcccgaggctgaagtgcaaattgataggttgatcacaggcagacttcaaagtttgcagacatatgtgactcaacaattaattagagctgcagaaatcagagcttctgctaatcttgctgctactaaaatgtcagagtgtgtacttggacaatcaaaaagagttgatttttgtggaaagggctatcatcttatgtccttccctcagtcagcacctcatggtgtagtcttcttgcatgtgacttatgtccctgcacaagaaaagaacttcacaactgctcctgccatttgtcatgatggaaaagcacactttcctcgtgaaggtgtctttgtttcaaatggcacacactggtttgtaacacaaaggaatttttatgaaccacaaatcattactacagacaacacatttgtgtctggtaactgtgatgttgtaataggaattgtcaacaacacagtttatgatcctttgcaacctgaattagactcattcaaggaggagttagataaatattttaagaatcatacatcaccagatgttgatttaggtgacatctctggcattaatgcttcagttgtaaacattcaaaaagaaattgaccgcctcaatgaggttgccaagaatttaaatgaatctctcatcgatctccaagaacttggaaagtatgagcagtatataaaatggccatggtacatttggctaggttttatagctggcttgattgccatagtaatggtgacaattatgctttgctgttaaaaaaaacaaaaaacaaaacggctattatgcgttaccggcgagacgctacggacttaaataattgagccttaaagaagaaattctttaagtggatgctctcaaactcagggaaacctaaatctagttatagacaaggcaatcctgagccaagccgaagtagtaattagtaagaccagtggacaatcgacggataacagcatatctagctgggcctcatgggccttcctttcactgcccgctttccagtcgggaaacctgtcgtgccagctgcattaacatggtcatagctgtttccttgcgtattgggcgctctccgcttcctcgctcactgactcgctgcgctcggtcgttcgggtaaagcctggggtgcctaatgagcaaaaggccagcaaaaggccaggaaccgtaaaaaggccgcgttgctggcgtttttccataggctccgcccccctgacgagcatcacaaaaatcgacgctcaagtcagaggtggcgaaacccgacaggactataaagataccaggcgtttccccctggaagctccctcgtgcgctctcctgttccgaccctgccgcttaccggatacctgtccgcctttctcccttcgggaagcgtggcgctttctcatagctcacgctgtaggtatctcagttcggtgtaggtcgttcgctccaagctgggctgtgtgcacgaaccccccgttcagcccgaccgctgcgccttatccggtaactatcgtcttgagtccaacccggtaagacacgacttatcgccactggcagcagccactggtaacaggattagcagagcgaggtatgtaggcggtgctacagagttcttgaagtggtggcctaactacggctacactagaagaacagtatttggtatctgcgctctgctgaagccagttaccttcggaaaaagagttggtagctcttgatccggcaaacaaaccaccgctggtagcggtggtttttttgtttgcaagcagcagattacgcgcagaaaaaaaggatctcaagaagatcctttgatcttttctacggggtctgacgctcagtggaacgaaaactcacgttaagggattttggtcatg

SEQ ID NO: 17 - DNA, 3711 bp, synthetic construct
  source 1..3711: mol_type = other DNA
atgtttgtttttcttgttttattgccactagtctctagtcagtgtgttaatcttacaaccagaactcaattaccccctgcatacactaattctttcacacgtggtgtttattaccctgacaaagttttcagatcctcagttttacattcaactcaggacttgttcttacctttcttttccaatgttacttggttccatgctatacatgtctctgggaccaatggtactaagaggtttgataaccctgtcctaccatttaatgatggtgtttattttgcttccactgagaagtctaacataataagaggctggatttttggtactactttagattcgaagacccagtccctacttattgttaataacgctactaatgttgttattaaagtctgtgaatttcaattttgtaatgatccatttttgggtgtttattaccacaaaaacaacaaaagttggatggaaagtgagttcagagtttattctagtgcgaataattgcacttttgaatatgtctctcagccttttcttatggaccttgaaggaaaacagggtaatttcaaaaatcttagggaatttgtgtttaagaatattgatggttattttaaaatatattctaagcacacgcctattaatttagtgcgtgatctccctcagggtttttcggctttagaaccattggtagatttgccaataggtattaacatcactaggtttcaaactttacttgctttacatagaagttatttgactcctggtgattcttcttcaggttggacagctggtgctgcagcttattatgtgggttatcttcaacctaggacttttctattaaaatataatgaaaatggaaccattacagatgctgtagactgtgcacttgaccctctctcagaaacaaagtgtacgttgaaatccttcactgtagaaaaaggaatctatcaaacttctaactttagagtccaaccaacagaatctattgttagatttcctaatattacaaacttgtgcccttttggtgaagtttttaacgccaccagatttgcatctgtttatgcttggaacaggaagagaatcagcaactgtgttgctgattattctgtcctatataattccgcatcattttccacttttaagtgttatggagtgtctcctactaaattaaatgatctctgctttactaatgtctatgcagattcatttgtaattagaggtgatgaagtcagacaaatcgctccagggcaaactggaaagattgctgattataattataaattaccagatgattttacaggctgcgttatagcttggaattctaacaatcttgattctaaggttggtggtaattataattacctgtatagattgtttaggaagtctaatctcaaaccttttgagagagatatttcaactgaaatctatcaggccggtagcacaccttgtaatggtgttgaaggttttaattgttactttcctttacaatcatatggtttccaacccactaatggtgttggttaccaaccatacagagtagtagtactttcttttgaacttctacatgcaccagcaactgtttgtggacctaaaaagtctactaatttggttaaaaacaaatgtgtcaatttcaacttcaatggtttaacaggcacaggtgttcttactgagtctaacaaaaagtttctgcctttccaacaatttggcagagacattgctgacactactgatgctgtccgtgatccacagacacttgagattcttgacattacaccatgttcttttggtggtgtcagtgttataacaccaggaacaaatacttctaaccaggttgctgttctttatcaggatgttaactgcacagaagtccctgttgctattcatgcagatcaacttactcctacttggcgtgtttattctacaggttctaatgtttttcaaacacgtgcaggctgtttaataggggctgaacatgtcaacaactcatatgagtgtgacatacccattggtgcaggtatatgcgctagttatcagactcagactaattctcctggcagcgccagcagtgtagctagtcaatccatcattgcctacactatgtcacttggtgcagaaaattcagttgcttactctaataactctattgccatacccacaaattttactattagtgttaccacagaaattctaccagtgtctatgaccaagacatcagtagattgtacaatgtacatttgtggtgattcaactgaatgcagcaatcttttgttgcaatatggcagtttttgtacacaattaaaccgtgctttaactggaatagctgttgaacaagacaaaaacacccaagaagtttttgcacaagtcaaacaaatttacaaaacaccaccaattaaagattttggtggttttaatttttcacaaatattaccagatccatcaaaaccaagcaagaggtcatttattgaagatctacttttcaacaaagtgacacttgcagatgctggcttcatcaaacaatatggtgattgccttggtgatattgctgctagggacctcatttgtgcacaaaagtttaacggccttactgttttgccacctttgctcacagatgaaatgattgctcaatacacttctgcactgttagcgggtacaatcacttctggttggacctttggtgcaggtgctgcattacaaataccatttgctatgcaaatggcttataggtttaatggtattggagttacacagaatgttctctatgagaaccaaaaattgattgccaaccaatttaatagtgctattggcaaaattcaagactcactttcttccacagcaagtgcacttggaaaacttcaagatgtggtcaaccaaaatgcacaagctttaaacacgcttgttaaacaacttagctccaattttggtgcaatttcaagtgttttaaatgatatcctttcacgtcttgaccctcccgaggctgaagtgcaaattgataggttgatcacaggcagacttcaaagtttgcagacatatgtgactcaacaattaattagagctgcagaaatcagagcttctgctaatcttgctgctactaaaatgtcagagtgtgtacttggacaatcaaaaagagttgatttttgtggaaagggctatcatcttatgtccttccctcagtcagcacctcatggtgtagtcttcttgcatgtgacttatgtccctgcacaagaaaagaacttcacaactgctcctgccatttgtcatgatggaaaagcacactttcctcgtgaaggtgtctttgtttcaaatggcacacactggtttgtaacacaaaggaatttttatgaaccacaaatcattactacagacaacacatttgtgtctggtaactgtgatgttgtaataggaattgtcaacaacacagtttatgatcctttgcaacctgaattagactcattcaaggaggagttagataaatattttaagaatcatacatcaccagatgttgatttaggtgacatctctggcattaatgcttcagttgtaaacattcaaaaagaaattgaccgcctcaatgaggttgccaagaatttaaatgaatctctcatcgatctccaagaacttggaaagtatgagcagtatataaaatggccatggtacatttggctaggttttatagctggcttgattgccatagtaatggtgacaattatgctttgctgttaa

SEQ ID NO: 18 - DNA, 7035 bp, synthetic construct
  source 1..7035: mol_type = other DNA
agattatcaaaaaggatcttcacctagatccttttaaattaaaaatgaagttttaaatcaatctaaagtatatatgagtaaacttggtctgacagttattagaaaaattcatccagcagacgataaaacgcaatacgctggctatccggtgccgcaatgccatacagcaccagaaaacgatccgcccattcgccgcccagttcttccgcaatatcacgggtggccagcgcaatatcctgataacgatccgccacgcccagacggccgcaatcaataaagccgctaaaacggccattttccaccataatgttcggcaggcacgcatcaccatgggtcaccaccagatcttcgccatccggcatgctcgctttcagacgcgcaaacagctctgccggtgccaggccctgatgttcttcatccagatcatcctgatccaccaggcccgcttccatacgggtacgcgcacgttcaatacgatgtttcgcctgatgatcaaacggacaggtcgccgggtccagggtatgcagacgacgcatggcatccgccataatgctcactttttctgccggcgccagatggctagacagcagatcctgacccggcacttcgcccagcagcagccaatcacggcccgcttcggtcaccacatccagcaccgccgcacacggaacaccggtggtggccagccagctcagacgcgccgcttcatcctgcagctcgttcagcgcaccgctcagatcggttttcacaaacagcaccggacgaccctgcgcgctcagacgaaacaccgccgcatcagagcagccaatggtctgctgcgcccaatcatagccaaacagacgttccacccacgctgccgggctacccgcatgcaggccatcctgttcaatcatactcttcctttttcaatattattgaagcatttatcagggttattgtctcatgagcggatacatatttgaatgtatttagaaaaataaacaaataggggttccgcgcacatttccccgaaaagtgccacctaaattgtaagcgttaatattttgttaaaattcgcgttaaatttttgttaaatcagctcattttttaaccaataggccgaaatcggcaaaatcccttataaatcaaaagaatagaccgagatagggttgagtggccgctacagggcgctcccattcgccattcaggctgcgcaactgttgggaagggcgtttcggtgcgggcctcttcgctattacgccagctggcgaaagggggatgtgctgcaaggcgattaagttgggtaacgccagggttttcccagtcacgacgttgtaaaacgacggccagtgagcgcgacgtaatacgactcactatagggcgaattgaaggaaggccgtcaaggccgcatgggaagccctcgaccgtcgattgtccactggtcaacaatagatgacttacaactaatcggaaggtgcagagactcgacgggagctaccctaacgtcaagacgagggtaaagagagagtccaattctcaaagccaataggcagtagcgaaagctgcaagagaatgaaaatccgttgaccttaaacggtcgtgtgggttcaagtccctccacccccacgccggaaacgcaatagccgaaaaacaaaaaacaaaaaaaacaaaaaaaaaaccaaaaaaacaaaacacaacgttactggccgaagccgcttggaataaggccggtgtgcgtttgtctatatgttattttccaccatattgccgtcttttggcaatgtgagggcccggaaacctggccctgtcttcttgacgagcattcctaggggtctttcccctctcgccaaaggaatgcaaggtctgttgaatgtcgtgaaggaagcagttcctctggaagcttcttgaagacaaacaacgtctgtagcgaccctttgcaggcagcggaaccccccacctggcgacaggtgcctctgcggccaaaagccacgtgtataagatacacctgcaaaggcggcacaaccccagtgccacgttgtgagttggatagttgtggaaagagtcaaatggctctcctcaagcgtattcaacaaggggctgaaggatgcccagaaggtaccccattgtatgggatctgatctggggcctcggtgcacatgctttacatgtgtttagtcgaggttaaaaaacgtctaggccccccgaaccacggggacgtggttttcctttgaaaaacacgatgataatagccaccatgtttgtttttcttgttttattgccactagtctctagtcagtgtgttaatcttacaaccagaactcaattaccccctgcatacactaattctttcacacgtggtgtttattaccctgacaaagttttcagatcctcagttttacattcaactcaggatttgttcttacctttcttttccaatgttacttggttccatgctatacatgtctctgggaccaatggtactaagaggtttgataaccctgtcctaccatttaatgatggtgtttattttgcttccactgagaagtctaacataataagaggctggatctttggtactactttagattcgaagacccagtccctacttattgttaataacgctactaatgttgttattaaagtctgtgaatttcaattttgtaatgatccatttttgggtgtttattaccacaaaaacaacaaaagttggatggaaagtgagttcagagtttattctagtgcgaataattgcacttttgaatatgtctctcagccttttcttatggaccttgaaggaaaacagggtaatttcaaaaatcttagggaatttgtgtttaagaatattgatggttattttaaaatatattctaagcacacgcctattaatttagtgcgtgatctccctcagggtttttcggctttagaaccattggtagatttgccaataggtattaacatcactaggtttcaaactttacttgctttacatagaagttatttgactcctggtgattcttcttcaggttggacagctggtgctgcagcttattatgtgggttatcttcaacctaggacttttctattaaaatataatgaaaatggaaccattacagatgctgtagactgtgcacttgaccctctctcagaaacaaagtgtacgttgaaatccttcactgtagaaaaaggaatctatcaaacttctaactttagagtccaaccaacagaatctattgttagatttcctaatattacaaacttgtgcccttttggtgaagtttttaacgccaccagatttgcatctgtttatgcttggaacaggaagagaatcagcaactgtgttgctgattattctgtcctatataattccgcatcattttccacttttaagtgttatggagtgtctcctactaaattaaatgatctctgctttactaatgtctatgcagattcatttgtaattagaggtgatgaagtcagacaaatcgctccagggcaaactggaaagattgctgattataattataaattaccagatgattttacaggctgcgttatagcttggaattctaacaatcttgattctaaggttggtggtaattataattacctgtatagattgtttaggaagtctaatctcaaaccttttgagagagatatttcaactgaaatctatcaggccggtagcacaccttgtaatggtgttgaaggttttaattgttactttcctttacaatcatatggtttccaacccactaatggtgttggttaccaaccatacagagtagtagtactttcttttgaacttctacatgcaccagcaactgtttgtggacctaaaaagtctactaatttggttaaaaacaaatgtgtcaatttcaacttcaatggtttaacaggcacaggtgttcttactgagtctaacaaaaagtttctgcctttccaacaatttggcagagacattgctgacactactgatgctgtccgtgatccacagacacttgagattcttgacattacaccatgttcttttggtggtgtcagtgttataacaccaggaacaaatacttctaaccaggttgctgttctttatcaggatgttaactgcacagaagtccctgttgctattcatgcagatcaacttactcctacttggcgtgtttattctacaggttctaatgtttttcaaacacgtgcaggctgtttaataggggctgaacatgtcaacaactcatatgagtgtgacatacccattggtgcaggtatatgcgctagttatcagactcagactaattctcctggcagcgccagcagtgtagctagtcaatccatcattgcctacactatgtcacttggtgcagaaaattcagttgcttactctaataactctattgccatacccacaaattttactattagtgttaccacagaaattctaccagtgtctatgaccaagacatcagtagattgtacaatgtacatttgtggtgattcaactgaatgcagcaatcttttgttgcaatatggcagtttttgtacacaattaaaccgtgctttaactgggatagctgttgaacaagacaaaaacacccaagaagtttttgcacaagtcaaacaaatttacaaaacaccaccaattaaagattttggtggttttaatttttcacaaatattaccagatccatcaaaaccaagcaagaggtcatttattgaagatctacttttcaacaaagtgacacttgcagatgctggcttcatcaaacaatatggtgattgccttggtgatattgctgctagggacctcatttgtgcacaaaagtttaacggccttactgttttgccacctttgctcacagatgaaatgattgctcaatacacttctgcactgttagcgggtacaatcacttctggttggacctttggtgcaggtgctgcattacaaataccatttgctatgcaaatggcttataggtttaatggtattggagttacacagaatgttctctatgagaaccaaaaattgattgccaaccaatttaatagtgccattggcaaaattcaagactcactttcttccacagcaagtgcacttggaaaacttcaagatgtggtcaaccaaaatgcacaagctttaaacacgcttgttaaacaacttagctccaattttggtgcaatttcaagtgttttaaatgatatcctttcacgtcttgaccctcccgaggctgaagtgcaaattgataggttgatcacaggcagacttcaaagtttgcagacatatgtgactcaacaattaattagagctgcagaaatcagagcttctgctaatcttgctgctactaaaatgtcagagtgtgtacttggacaatcaaaaagagttgatttttgtggaaagggctatcatcttatgtccttccctcagtcagcacctcatggtgtagtcttcttgcatgtgacttatgtccctgcacaagaaaagaacttcacaactgctcctgccatttgtcatgatggaaaagcacactttcctcgtgaaggtgtctttgtttcaaatggcacacactggtttgtaacacaaaggaatttttatgaaccacaaatcattactacagacaacacatttgtgtctggtaactgtgatgttgtaataggaattgtcaacaacacagtttatgatcctttgcaacctgaattagactcattcaaggaggagttagataaatattttaagaatcatacatcaccagatgttgatttaggtgacatctctggcattaatgcttcagttgtaaacattcaaaaagaaattgaccgcctcaatgaggttgccaagaatttaaatgaatctctcatcgatctccaagaacttggaaagtatgagcaggggtatatccctgaagcccccagggacggccaggcttacgtcagaaaggatggagagtgggtgctcttgagcaccttcctgtaaaaaaaacaaaaaacaaaacggctattatgcgttaccggcgagacgctacggacttaaataattgagccttaaagaagaaattctttaagtggatgctctcaaactcagggaaacctaaatctagttatagacaaggcaatcctgagccaagccgaagtagtaattagtaagaccagtggacaatcgacggataacagcatatctagctgggcctcatgggccttcctttcactgcccgctttccagtcgggaaacctgtcgtgccagctgcattaacatggtcatagctgtttccttgcgtattgggcgctctccgcttcctcgctcactgactcgctgcgctcggtcgttcgggtaaagcctggggtgcctaatgagcaaaaggccagcaaaaggccaggaaccgtaaaaaggccgcgttgctggcgtttttccataggctccgcccccctgacgagcatcacaaaaatcgacgctcaagtcagaggtggcgaaacccgacaggactataaagataccaggcgtttccccctggaagctccctcgtgcgctctcctgttccgaccctgccgcttaccggatacctgtccgcctttctcccttcgggaagcgtggcgctttctcatagctcacgctgtaggtatctcagttcggtgtaggtcgttcgctccaagctgggctgtgtgcacgaaccccccgttcagcccgaccgctgcgccttatccggtaactatcgtcttgagtccaacccggtaagacacgacttatcgccactggcagcagccactggtaacaggattagcagagcgaggtatgtaggcggtgctacagagttcttgaagtggtggcctaactacggctacactagaagaacagtatttggtatctgcgctctgctgaagccagttaccttcggaaaaagagttggtagctcttgatccggcaaacaaaccaccgctggtagcggtggtttttttgtttgcaagcagcagattacgcgcagaaaaaaaggatctcaagaagatcctttgatcttttctacggggtctgacgctcagtggaacgaaaactcacgttaagggattttggtcatg

SEQ ID NO: 19 - DNA, 3708 bp, synthetic construct
  source 1..3708: mol_type = other DNA
atgtttgtttttcttgttttattgccactagtctctagtcagtgtgttaatcttacaaccagaactcaattaccccctgcatacactaattctttcacacgtggtgtttattaccctgacaaagttttcagatcctcagttttacattcaactcaggatttgttcttacctttcttttccaatgttacttggttccatgctatacatgtctctgggaccaatggtactaagaggtttgataaccctgtcctaccatttaatgatggtgtttattttgcttccactgagaagtctaacataataagaggctggatctttggtactactttagattcgaagacccagtccctacttattgttaataacgctactaatgttgttattaaagtctgtgaatttcaattttgtaatgatccatttttgggtgtttattaccacaaaaacaacaaaagttggatggaaagtgagttcagagtttattctagtgcgaataattgcacttttgaatatgtctctcagccttttcttatggaccttgaaggaaaacagggtaatttcaaaaatcttagggaatttgtgtttaagaatattgatggttattttaaaatatattctaagcacacgcctattaatttagtgcgtgatctccctcagggtttttcggctttagaaccattggtagatttgccaataggtattaacatcactaggtttcaaactttacttgctttacatagaagttatttgactcctggtgattcttcttcaggttggacagctggtgctgcagcttattatgtgggttatcttcaacctaggacttttctattaaaatataatgaaaatggaaccattacagatgctgtagactgtgcacttgaccctctctcagaaacaaagtgtacgttgaaatccttcactgtagaaaaaggaatctatcaaacttctaactttagagtccaaccaacagaatctattgttagatttcctaatattacaaacttgtgcccttttggtgaagtttttaacgccaccagatttgcatctgtttatgcttggaacaggaagagaatcagcaactgtgttgctgattattctgtcctatataattccgcatcattttccacttttaagtgttatggagtgtctcctactaaattaaatgatctctgctttactaatgtctatgcagattcatttgtaattagaggtgatgaagtcagacaaatcgctccagggcaaactggaaagattgctgattataattataaattaccagatgattttacaggctgcgttatagcttggaattctaacaatcttgattctaaggttggtggtaattataattacctgtatagattgtttaggaagtctaatctcaaaccttttgagagagatatttcaactgaaatctatcaggccggtagcacaccttgtaatggtgttgaaggttttaattgttactttcctttacaatcatatggtttccaacccactaatggtgttggttaccaaccatacagagtagtagtactttcttttgaacttctacatgcaccagcaactgtttgtggacctaaaaagtctactaatttggttaaaaacaaatgtgtcaatttcaacttcaatggtttaacaggcacaggtgttcttactgagtctaacaaaaagtttctgcctttccaacaatttggcagagacattgctgacactactgatgctgtccgtgatccacagacacttgagattcttgacattacaccatgttcttttggtggtgtcagtgttataacaccaggaacaaatacttctaaccaggttgctgttctttatcaggatgttaactgcacagaagtccctgttgctattcatgcagatcaacttactcctacttggcgtgtttattctacaggttctaatgtttttcaaacacgtgcaggctgtttaataggggctgaacatgtcaacaactcatatgagtgtgacatacccattggtgcaggtatatgcgctagttatcagactcagactaattctcctggcagcgccagcagtgtagctagtcaatccatcattgcctacactatgtcacttggtgcagaaaattcagttgcttactctaataactctattgccatacccacaaattttactattagtgttaccacagaaattctaccagtgtctatgaccaagacatcagtagattgtacaatgtacatttgtggtgattcaactgaatgcagcaatcttttgttgcaatatggcagtttttgtacacaattaaaccgtgctttaactgggatagctgttgaacaagacaaaaacacccaagaagtttttgcacaagtcaaacaaatttacaaaacaccaccaattaaagattttggtggttttaatttttcacaaatattaccagatccatcaaaaccaagcaagaggtcatttattgaagatctacttttcaacaaagtgacacttgcagatgctggcttcatcaaacaatatggtgattgccttggtgatattgctgctagggacctcatttgtgcacaaaagtttaacggccttactgttttgccacctttgctcacagatgaaatgattgctcaatacacttctgcactgttagcgggtacaatcacttctggttggacctttggtgcaggtgctgcattacaaataccatttgctatgcaaatggcttataggtttaatggtattggagttacacagaatgttctctatgagaaccaaaaattgattgccaaccaatttaatagtgccattggcaaaattcaagactcactttcttccacagcaagtgcacttggaaaacttcaagatgtggtcaaccaaaatgcacaagctttaaacacgcttgttaaacaacttagctccaattttggtgcaatttcaagtgttttaaatgatatcctttcacgtcttgaccctcccgaggctgaagtgcaaattgataggttgatcacaggcagacttcaaagtttgcagacatatgtgactcaacaattaattagagctgcagaaatcagagcttctgctaatcttgctgctactaaaatgtcagagtgtgtacttggacaatcaaaaagagttgatttttgtggaaagggctatcatcttatgtccttccctcagtcagcacctcatggtgtagtcttcttgcatgtgacttatgtccctgcacaagaaaagaacttcacaactgctcctgccatttgtcatgatggaaaagcacactttcctcgtgaaggtgtctttgtttcaaatggcacacactggtttgtaacacaaaggaatttttatgaaccacaaatcattactacagacaacacatttgtgtctggtaactgtgatgttgtaataggaattgtcaacaacacagtttatgatcctttgcaacctgaattagactcattcaaggaggagttagataaatattttaagaatcatacatcaccagatgttgatttaggtgacatctctggcattaatgcttcagttgtaaacattcaaaaagaaattgaccgcctcaatgaggttgccaagaatttaaatgaatctctcatcgatctccaagaacttggaaagtatgagcaggggtatatccctgaagcccccagggacggccaggcttacgtcagaaaggatggagagtgggtgctcttgagcaccttcctgtaa

SEQ ID NO: 20 - DNA, 7149 bp, synthetic construct
  source 1..7149: mol_type = other DNA
agattatcaaaaaggatcttcacctagatccttttaaattaaaaatgaagttttaaatcaatctaaagtatatatgagtaaacttggtctgacagttattagaaaaattcatccagcagacgataaaacgcaatacgctggctatccggtgccgcaatgccatacagcaccagaaaacgatccgcccattcgccgcccagttcttccgcaatatcacgggtggccagcgcaatatcctgataacgatccgccacgcccagacggccgcaatcaataaagccgctaaaacggccattttccaccataatgttcggcaggcacgcatcaccatgggtcaccaccagatcttcgccatccggcatgctcgctttcagacgcgcaaacagctctgccggtgccaggccctgatgttcttcatccagatcatcctgatccaccaggcccgcttccatacgggtacgcgcacgttcaatacgatgtttcgcctgatgatcaaacggacaggtcgccgggtccagggtatgcagacgacgcatggcatccgccataatgctcactttttctgccggcgccagatggctagacagcagatcctgacccggcacttcgcccagcagcagccaatcacggcccgcttcggtcaccacatccagcaccgccgcacacggaacaccggtggtggccagccagctcagacgcgccgcttcatcctgcagctcgttcagcgcaccgctcagatcggttttcacaaacagcaccggacgaccctgcgcgctcagacgaaacaccgccgcatcagagcagccaatggtctgctgcgcccaatcatagccaaacagacgttccacccacgctgccgggctacccgcatgcaggccatcctgttcaatcatactcttcctttttcaatattattgaagcatttatcagggttattgtctcatgagcggatacatatttgaatgtatttagaaaaataaacaaataggggttccgcgcacatttccccgaaaagtgccacctaaattgtaagcgttaatattttgttaaaattcgcgttaaatttttgttaaatcagctcattttttaaccaataggccgaaatcggcaaaatcccttataaatcaaaagaatagaccgagatagggttgagtggccgctacagggcgctcccattcgccattcaggctgcgcaactgttgggaagggcgtttcggtgcgggcctcttcgctattacgccagctggcgaaagggggatgtgctgcaaggcgattaagttgggtaacgccagggttttcccagtcacgacgttgtaaaacgacggccagtgagcgcgacgtaatacgactcactatagggcgaattgaaggaaggccgtcaaggccgcatgggaagccctcgaccgtcgattgtccactggtcaacaatagatgacttacaactaatcggaaggtgcagagactcgacgggagctaccctaacgtcaagacgagggtaaagagagagtccaattctcaaagccaataggcagtagcgaaagctgcaagagaatgaaaatccgttgaccttaaacggtcgtgtgggttcaagtccctccacccccacgccggaaacgcaatagccgaaaaacaaaaaacaaaaaaaacaaaaaaaaaaccaaaaaaacaaaacacaacgttactggccgaagccgcttggaataaggccggtgtgcgtttgtctatatgttattttccaccatattgccgtcttttggcaatgtgagggcccggaaacctggccctgtcttcttgacgagcattcctaggggtctttcccctctcgccaaaggaatgcaaggtctgttgaatgtcgtgaaggaagcagttcctctggaagcttcttgaagacaaacaacgtctgtagcgaccctttgcaggcagcggaaccccccacctggcgacaggtgcctctgcggccaaaagccacgtgtataagatacacctgcaaaggcggcacaaccccagtgccacgttgtgagttggatagttgtggaaagagtcaaatggctctcctcaagcgtattcaacaaggggctgaaggatgcccagaaggtaccccattgtatgggatctgatctggggcctcggtgcacatgctttacatgtgtttagtcgaggttaaaaaacgtctaggccccccgaaccacggggacgtggttttcctttgaaaaacacgatgataatagccaccatgtttgtttttcttgttttattgccactagtctctagtcagtgtgttaatcttacaaccagaactcaattaccccctgcatacactaattctttcacacgtggtgtttattaccctgacaaagttttcagatcctcagttttacattcaactcaggatttgttcttacctttcttttccaatgttacttggttccatgctatacatgtctctgggaccaatggtactaagaggtttgataaccctgtcctaccatttaatgatggtgtttattttgcttccactgagaagtctaacataataagaggctggatctttggtactactttagattcgaagacccagtccctacttattgttaataacgctactaatgttgttattaaagtctgtgaatttcaattttgtaatgatccatttttgggtgtttattaccacaaaaacaacaaaagttggatggaaagtgagttcagagtttattctagtgcgaataattgcacttttgaatatgtctctcagccttttcttatggaccttgaaggaaaacagggtaatttcaaaaatcttagggaatttgtgtttaagaatattgatggttattttaaaatatattctaagcacacgcctattaatttagtgcgtgatctccctcagggtttttcggctttagaaccattggtagatttgccaataggtattaacatcactaggtttcaaactttacttgctttacatagaagttatttgactcctggtgattcttcttcaggttggacagctggtgctgcagcttattatgtgggttatcttcaacctaggacttttctattaaaatataatgaaaatggaaccattacagatgctgtagactgtgcacttgaccctctctcagaaacaaagtgtacgttgaaatccttcactgtagaaaaaggaatctatcaaacttctaactttagagtccaaccaacagaatctattgttagatttcctaatattacaaacttgtgcccttttggtgaagtttttaacgccaccagatttgcatctgtttatgcttggaacaggaagagaatcagcaactgtgttgctgattattctgtcctatataattccgcatcattttccacttttaagtgttatggagtgtctcctactaaattaaatgatctctgctttactaatgtctatgcagattcatttgtaattagaggtgatgaagtcagacaaatcgctccagggcaaactggaaagattgctgattataattataaattaccagatgattttacaggctgcgttatagcttggaattctaacaatcttgattctaaggttggtggtaattataattacctgtatagattgtttaggaagtctaatctcaaaccttttgagagagatatttcaactgaaatctatcaggccggtagcacaccttgtaatggtgttgaaggttttaattgttactttcctttacaatcatatggtttccaacccactaatggtgttggttaccaaccatacagagtagtagtactttcttttgaacttctacatgcaccagcaactgtttgtggacctaaaaagtctactaatttggttaaaaacaaatgtgtcaatttcaacttcaatggtttaacaggcacaggtgttcttactgagtctaacaaaaagtttctgcctttccaacaatttggcagagacattgctgacactactgatgctgtccgtgatccacagacacttgagattcttgacattacaccatgttcttttggtggtgtcagtgttataacaccaggaacaaatacttctaaccaggttgctgttctttatcaggatgttaactgcacagaagtccctgttgctattcatgcagatcaacttactcctacttggcgtgtttattctacaggttctaatgtttttcaaacacgtgcaggctgtttaataggggctgaacatgtcaacaactcatatgagtgtgacatacccattggtgcaggtatatgcgctagttatcagactcagactaattctcctggcagcgccagcagtgtagctagtcaatccatcattgcctacactatgtcacttggtgcagaaaattcagttgcttactctaataactctattgccatacccacaaattttactattagtgttaccacagaaattctaccagtgtctatgaccaagacatcagtagattgtacaatgtacatttgtggtgattcaactgaatgcagcaatcttttgttgcaatatggcagtttttgtacacaattaaaccgtgctttaactgggatagctgttgaacaagacaaaaacacccaagaagtttttgcacaagtcaaacaaatttacaaaacaccaccaattaaagattttggtggttttaatttttcacaaatattaccagatccatcaaaaccaagcaagaggtcatttattgaagatctacttttcaacaaagtgacacttgcagatgctggcttcatcaaacaatatggtgattgccttggtgatattgctgctagggacctcatttgtgcacaaaagtttaacggccttactgttttgccacctttgctcacagatgaaatgattgctcaatacacttctgcactgttagcgggtacaatcacttctggttggacctttggtgcaggtgctgcattacaaataccatttgctatgcaaatggcttataggtttaatggtattggagttacacagaatgttctctatgagaaccaaaaattgattgccaaccaatttaatagtgccattggcaaaattcaagactcactttcttccacagcaagtgcacttggaaaacttcaagatgtggtcaaccaaaatgcacaagctttaaacacgcttgttaaacaacttagctccaattttggtgcaatttcaagtgttttaaatgatatcctttcacgtcttgaccctcccgaggctgaagtgcaaattgataggttgatcacaggcagacttcaaagtttgcagacatatgtgactcaacaattaattagagctgcagaaatcagagcttctgctaatcttgctgctactaaaatgtcagagtgtgtacttggacaatcaaaaagagttgatttttgtggaaagggctatcatcttatgtccttccctcagtcagcacctcatggtgtagtcttcttgcatgtgacttatgtccctgcacaagaaaagaacttcacaactgctcctgccatttgtcatgatggaaaagcacactttcctcgtgaaggtgtctttgtttcaaatggcacacactggtttgtaacacaaaggaatttttatgaaccacaaatcattactacagacaacacatttgtgtctggtaactgtgatgttgtaataggaattgtcaacaacacagtttatgatcctttgcaacctgaattagactcattcaaggaggagttagataaatattttaagaatcatacatcaccagatgttgatttaggtgacatctctggcattaatgcttcagttgtaaacattcaaaaagaaattgaccgcctcaatgaggttgccaagaatttaaatgaatctctcatcgatctccaagaacttggaaagtatgagcagtatataaaatggccatggtacatttggctaggttttatagctggcttgattgccatagtaatggtgacaattatgctttgctgtatgaccagttgctgtagttgtctcaagggctgttgttcttgtggatcctgctgcaaatttgatgaagacgactctgagccagtgctcaaaggagtcaaattacattacacataaaaaaaacaaaaaacaaaacggctattatgcgttaccggcgagacgctacggacttaaataattgagccttaaagaagaaattctttaagtggatgctctcaaactcagggaaacctaaatctagttatagacaaggcaatcctgagccaagccgaagtagtaattagtaagaccagtggacaatcgacggataacagcatatctagctgggcctcatgggccttcctttcactgcccgctttccagtcgggaaacctgtcgtgccagctgcattaacatggtcatagctgtttccttgcgtattgggcgctctccgcttcctcgctcactgactcgctgcgctcggtcgttcgggtaaagcctggggtgcctaatgagcaaaaggccagcaaaaggccaggaaccgtaaaaaggccgcgttgctggcgtttttccataggctccgcccccctgacgagcatcacaaaaatcgacgctcaagtcagaggtggcgaaacccgacaggactataaagataccaggcgtttccccctggaagctccctcgtgcgctctcctgttccgaccctgccgcttaccggatacctgtccgcctttctcccttcgggaagcgtggcgctttctcatagctcacgctgtaggtatctcagttcggtgtaggtcgttcgctccaagctgggctgtgtgcacgaaccccccgttcagcccgaccgctgcgccttatccggtaactatcgtcttgagtccaacccggtaagacacgacttatcgccactggcagcagccactggtaacaggattagcagagcgaggtatgtaggcggtgctacagagttcttgaagtggtggcctaactacggctacactagaagaacagtatttggtatctgcgctctgctgaagccagttaccttcggaaaaagagttggtagctcttgatccggcaaacaaaccaccgctggtagcggtggtttttttgtttgcaagcagcagattacgcgcagaaaaaaaggatctcaagaagatcctttgatcttttctacggggtctgacgctcagtggaacgaaaactcacgttaagggattttggtcatg

SEQ ID NO: 21 - DNA, 3822 bp, synthetic construct
  source 1..3822: mol_type = other DNA
atgtttgtttttcttgttttattgccactagtctctagtcagtgtgttaatcttacaaccagaactcaattaccccctgcatacactaattctttcacacgtggtgtttattaccctgacaaagttttcagatcctcagttttacattcaactcaggatttgttcttacctttcttttccaatgttacttggttccatgctatacatgtctctgggaccaatggtactaagaggtttgataaccctgtcctaccatttaatgatggtgtttattttgcttccactgagaagtctaacataataagaggctggatctttggtactactttagattcgaagacccagtccctacttattgttaataacgctactaatgttgttattaaagtctgtgaatttcaattttgtaatgatccatttttgggtgtttattaccacaaaaacaacaaaagttggatggaaagtgagttcagagtttattctagtgcgaataattgcacttttgaatatgtctctcagccttttcttatggaccttgaaggaaaacagggtaatttcaaaaatcttagggaatttgtgtttaagaatattgatggttattttaaaatatattctaagcacacgcctattaatttagtgcgtgatctccctcagggtttttcggctttagaaccattggtagatttgccaataggtattaacatcactaggtttcaaactttacttgctttacatagaagttatttgactcctggtgattcttcttcaggttggacagctggtgctgcagcttattatgtgggttatcttcaacctaggacttttctattaaaatataatgaaaatggaaccattacagatgctgtagactgtgcacttgaccctctctcagaaacaaagtgtacgttgaaatccttcactgtagaaaaaggaatctatcaaacttctaactttagagtccaaccaacagaatctattgttagatttcctaatattacaaacttgtgcccttttggtgaagtttttaacgccaccagatttgcatctgtttatgcttggaacaggaagagaatcagcaactgtgttgctgattattctgtcctatataattccgcatcattttccacttttaagtgttatggagtgtctcctactaaattaaatgatctctgctttactaatgtctatgcagattcatttgtaattagaggtgatgaagtcagacaaatcgctccagggcaaactggaaagattgctgattataattataaattaccagatgattttacaggctgcgttatagcttggaattctaacaatcttgattctaaggttggtggtaattataattacctgtatagattgtttaggaagtctaatctcaaaccttttgagagagatatttcaactgaaatctatcaggccggtagcacaccttgtaatggtgttgaaggttttaattgttactttcctttacaatcatatggtttccaacccactaatggtgttggttaccaaccatacagagtagtagtactttcttttgaacttctacatgcaccagcaactgtttgtggacctaaaaagtctactaatttggttaaaaacaaatgtgtcaatttcaacttcaatggtttaacaggcacaggtgttcttactgagtctaacaaaaagtttctgcctttccaacaatttggcagagacattgctgacactactgatgctgtccgtgatccacagacacttgagattcttgacattacaccatgttcttttggtggtgtcagtgttataacaccaggaacaaatacttctaaccaggttgctgttctttatcaggatgttaactgcacagaagtccctgttgctattcatgcagatcaacttactcctacttggcgtgtttattctacaggttctaatgtttttcaaacacgtgcaggctgtttaataggggctgaacatgtcaacaactcatatgagtgtgacatacccattggtgcaggtatatgcgctagttatcagactcagactaattctcctggcagcgccagcagtgtagctagtcaatccatcattgcctacactatgtcacttggtgcagaaaattcagttgcttactctaataactctattgccatacccacaaattttactattagtgttaccacagaaattctaccagtgtctatgaccaagacatcagtagattgtacaatgtacatttgtggtgattcaactgaatgcagcaatcttttgttgcaatatggcagtttttgtacacaattaaaccgtgctttaactgggatagctgttgaacaagacaaaaacacccaagaagtttttgcacaagtcaaacaaatttacaaaacaccaccaattaaagattttggtggttttaatttttcacaaatattaccagatccatcaaaaccaagcaagaggtcatttattgaagatctacttttcaacaaagtgacacttgcagatgctggcttcatcaaacaatatggtgattgccttggtgatattgctgctagggacctcatttgtgcacaaaagtttaacggccttactgttttgccacctttgctcacagatgaaatgattgctcaatacacttctgcactgttagcgggtacaatcacttctggttggacctttggtgcaggtgctgcattacaaataccatttgctatgcaaatggcttataggtttaatggtattggagttacacagaatgttctctatgagaaccaaaaattgattgccaaccaatttaatagtgccattggcaaaattcaagactcactttcttccacagcaagtgcacttggaaaacttcaagatgtggtcaaccaaaatgcacaagctttaaacacgcttgttaaacaacttagctccaattttggtgcaatttcaagtgttttaaatgatatcctttcacgtcttgaccctcccgaggctgaagtgcaaattgataggttgatcacaggcagacttcaaagtttgcagacatatgtgactcaacaattaattagagctgcagaaatcagagcttctgctaatcttgctgctactaaaatgtcagagtgtgtacttggacaatcaaaaagagttgatttttgtggaaagggctatcatcttatgtccttccctcagtcagcacctcatggtgtagtcttcttgcatgtgacttatgtccctgcacaagaaaagaacttcacaactgctcctgccatttgtcatgatggaaaagcacactttcctcgtgaaggtgtctttgtttcaaatggcacacactggtttgtaacacaaaggaatttttatgaaccacaaatcattactacagacaacacatttgtgtctggtaactgtgatgttgtaataggaattgtcaacaacacagtttatgatcctttgcaacctgaattagactcattcaaggaggagttagataaatattttaagaatcatacatcaccagatgttgatttaggtgacatctctggcattaatgcttcagttgtaaacattcaaaaagaaattgaccgcctcaatgaggttgccaagaatttaaatgaatctctcatcgatctccaagaacttggaaagtatgagcagtatataaaatggccatggtacatttggctaggttttatagctggcttgattgccatagtaatggtgacaattatgctttgctgtatgaccagttgctgtagttgtctcaagggctgttgttcttgtggatcctgctgcaaatttgatgaagacgactctgagccagtgctcaaaggagtcaaattacattacacataa

SEQ ID NO: 22 - DNA, 7038 bp, synthetic construct
  source 1..7038: mol_type = other DNA
agattatcaaaaaggatcttcacctagatccttttaaattaaaaatgaagttttaaatcaatctaaagtatatatgagtaaacttggtctgacagttattagaaaaattcatccagcagacgataaaacgcaatacgctggctatccggtgccgcaatgccatacagcaccagaaaacgatccgcccattcgccgcccagttcttccgcaatatcacgggtggccagcgcaatatcctgataacgatccgccacgcccagacggccgcaatcaataaagccgctaaaacggccattttccaccataatgttcggcaggcacgcatcaccatgggtcaccaccagatcttcgccatccggcatgctcgctttcagacgcgcaaacagctctgccggtgccaggccctgatgttcttcatccagatcatcctgatccaccaggcccgcttccatacgggtacgcgcacgttcaatacgatgtttcgcctgatgatcaaacggacaggtcgccgggtccagggtatgcagacgacgcatggcatccgccataatgctcactttttctgccggcgccagatggctagacagcagatcctgacccggcacttcgcccagcagcagccaatcacggcccgcttcggtcaccacatccagcaccgccgcacacggaacaccggtggtggccagccagctcagacgcgccgcttcatcctgcagctcgttcagcgcaccgctcagatcggttttcacaaacagcaccggacgaccctgcgcgctcagacgaaacaccgccgcatcagagcagccaatggtctgctgcgcccaatcatagccaaacagacgttccacccacgctgccgggctacccgcatgcaggccatcctgttcaatcatactcttcctttttcaatattattgaagcatttatcagggttattgtctcatgagcggatacatatttgaatgtatttagaaaaataaacaaataggggttccgcgcacatttccccgaaaagtgccacctaaattgtaagcgttaatattttgttaaaattcgcgttaaatttttgttaaatcagctcattttttaaccaataggccgaaatcggcaaaatcccttataaatcaaaagaatagaccgagatagggttgagtggccgctacagggcgctcccattcgccattcaggctgcgcaactgttgggaagggcgtttcggtgcgggcctcttcgctattacgccagctggcgaaagggggatgtgctgcaaggcgattaagttgggtaacgccagggttttcccagtcacgacgttgtaaaacgacggccagtgagcgcgacgtaatacgactcactatagggcgaattgaaggaaggccgtcaaggccgcatgggaagccctcgaccgtcgattgtccactggtcaacaatagatgacttacaactaatcggaaggtgcagagactcgacgggagctaccctaacgtcaagacgagggtaaagagagagtccaattctcaaagccaataggcagtagcgaaagctgcaagagaatgaaaatccgttgaccttaaacggtcgtgtgggttcaagtccctccacccccacgccggaaacgcaatagccgaaaaacaaaaaacaaaaaaaacaaaaaaaaaaccaaaaaaacaaaacacaacgttactggccgaagccgcttggaataaggccggtgtgcgtttgtctatatgttattttccaccatattgccgtcttttggcaatgtgagggcccggaaacctggccctgtcttcttgacgagcattcctaggggtctttcccctctcgccaaaggaatgcaaggtctgttgaatgtcgtgaaggaagcagttcctctggaagcttcttgaagacaaacaacgtctgtagcgaccctttgcaggcagcggaaccccccacctggcgacaggtgcctctgcggccaaaagccacgtgtataagatacacctgcaaaggcggcacaaccccagtgccacgttgtgagttggatagttgtggaaagagtcaaatggctctcctcaagcgtattcaacaaggggctgaaggatgcccagaaggtaccccattgtatgggatctgatctggggcctcggtgcacatgctttacatgtgtttagtcgaggttaaaaaacgtctaggccccccgaaccacggggacgtggttttcctttgaaaaacacgatgataatagccaccatgtttgtttttcttgttttattgccactagtctctagtcagtgtgttaatcttacaaccagaactcaattaccccctgcatacactaattctttcacacgtggtgtttattaccctgacaaagttttcagatcctcagttttacattcaactcaggatttgttcttacctttcttttccaatgttacttggttccatgctatacatgtctctgggaccaatggtactaagaggtttgataaccctgtcctaccatttaatgatggtgtttattttgcttccactgagaagtctaacataataagaggctggatctttggtactactttagattcgaagacccagtccctacttattgttaataacgctactaatgttgttattaaagtctgtgaatttcaattttgtaatgatccatttttgggtgtttattaccacaaaaacaacaaaagttggatggaaagtgagttcagagtttattctagtgcgaataattgcacttttgaatatgtctctcagccttttcttatggaccttgaaggaaaacagggtaatttcaaaaatcttagggaatttgtgtttaagaatattgatggttattttaaaatatattctaagcacacgcctattaatttagtgcgtgatctccctcagggtttttcggctttagaaccattggtagatttgccaataggtattaacatcactaggtttcaaactttacttgctttacatagaagttatttgactcctggtgattcttcttcaggttggacagctggtgctgcagcttattatgtgggttatcttcaacctaggacttttctattaaaatataatgaaaatggaaccattacagatgctgtagactgtgcacttgaccctctctcagaaacaaagtgtacgttgaaatccttcactgtagaaaaaggaatctatcaaacttctaactttagagtccaaccaacagaatctattgttagatttcctaatattacaaacttgtgcccttttggtgaagtttttaacgccaccagatttgcatctgtttatgcttggaacaggaagagaatcagcaactgtgttgctgattattctgtcctatataattccgcatcattttccacttttaagtgttatggagtgtctcctactaaattaaatgatctctgctttactaatgtctatgcagattcatttgtaattagaggtgatgaagtcagacaaatcgctccagggcaaactggaaagattgctgattataattataaattaccagatgattttacaggctgcgttatagcttggaattctaacaatcttgattctaaggttggtggtaattataattacctgtatagattgtttaggaagtctaatctcaaaccttttgagagagatatttcaactgaaatctatcaggccggtagcacaccttgtaatggtgttgaaggttttaattgttactttcctttacaatcatatggtttccaacccactaatggtgttggttaccaaccatacagagtagtagtactttcttttgaacttctacatgcaccagcaactgtttgtggacctaaaaagtctactaatttggttaaaaacaaatgtgtcaatttcaacttcaatggtttaacaggcacaggtgttcttactgagtctaacaaaaagtttctgcctttccaacaatttggcagagacattgctgacactactgatgctgtccgtgatccacagacacttgagattcttgacattacaccatgttcttttggtggtgtcagtgttataacaccaggaacaaatacttctaaccaggttgctgttctttatcaggatgttaactgcacagaagtccctgttgctattcatgcagatcaacttactcctacttggcgtgtttattctacaggttctaatgtttttcaaacacgtgcaggctgtttaataggggctgaacatgtcaacaactcatatgagtgtgacatacccattggtgcaggtatatgcgctagttatcagactcagactaattctcctggcagcgccagcagtgtagctagtcaatccatcattgcctacactatgtcacttggtgcagaaaattcagttgcttactctaataactctattgccatacccacaaattttactattagtgttaccacagaaattctaccagtgtctatgaccaagacatcagtagattgtacaatgtacatttgtggtgattcaactgaatgcagcaatcttttgttgcaatatggcagtttttgtacacaattaaaccgtgctttaactgggatagctgttgaacaagacaaaaacacccaagaagtttttgcacaagtcaaacaaatttacaaaacaccaccaattaaagattttggtggttttaatttttcacaaatattaccagatccatcaaaaccaagcaagaggtcatttattgaagatctacttttcaacaaagtgacacttgcagatgctggcttcatcaaacaatatggtgattgccttggtgatattgctgctagggacctcatttgtgcacaaaagtttaacggccttactgttttgccacctttgctcacagatgaaatgattgctcaatacacttctgcactgttagcgggtacaatcacttctggttggacctttggtgcaggtgctgcattacaaataccatttgctatgcaaatggcttataggtttaatggtattggagttacacagaatgttctctatgagaaccaaaaattgattgccaaccaatttaatagtgccattggcaaaattcaagactcactttcttccacagcaagtgcacttggaaaacttcaagatgtggtcaaccaaaatgcacaagctttaaacacgcttgttaaacaacttagctccaattttggtgcaatttcaagtgttttaaatgatatcctttcacgtcttgaccctcccgaggctgaagtgcaaattgataggttgatcacaggcagacttcaaagtttgcagacatatgtgactcaacaattaattagagctgcagaaatcagagcttctgctaatcttgctgctactaaaatgtcagagtgtgtacttggacaatcaaaaagagttgatttttgtggaaagggctatcatcttatgtccttccctcagtcagcacctcatggtgtagtcttcttgcatgtgacttatgtccctgcacaagaaaagaacttcacaactgctcctgccatttgtcatgatggaaaagcacactttcctcgtgaaggtgtctttgtttcaaatggcacacactggtttgtaacacaaaggaatttttatgaaccacaaatcattactacagacaacacatttgtgtctggtaactgtgatgttgtaataggaattgtcaacaacacagtttatgatcctttgcaacctgaattagactcattcaaggaggagttagataaatattttaagaatcatacatcaccagatgttgatttaggtgacatctctggcattaatgcttcagttgtaaacattcaaaaagaaattgaccgcctcaatgaggttgccaagaatttaaatgaatctctcatcgatctccaagaacttggaaagtatgagcagtatataaaatggccatggtacatttggctaggttttatagctggcttgattgccatagtaatggtgacaattatgctttgctgttaaaaaaaacaaaaaacaaaacggctattatgcgttaccggcgagacgctacggacttaaataattgagccttaaagaagaaattctttaagtggatgctctcaaactcagggaaacctaaatctagttatagacaaggcaatcctgagccaagccgaagtagtaattagtaagaccagtggacaatcgacggataacagcatatctagctgggcctcatgggccttcctttcactgcccgctttccagtcgggaaacctgtcgtgccagctgcattaacatggtcatagctgtttccttgcgtattgggcgctctccgcttcctcgctcactgactcgctgcgctcggtcgttcgggtaaagcctggggtgcctaatgagcaaaaggccagcaaaaggccaggaaccgtaaaaaggccgcgttgctggcgtttttccataggctccgcccccctgacgagcatcacaaaaatcgacgctcaagtcagaggtggcgaaacccgacaggactataaagataccaggcgtttccccctggaagctccctcgtgcgctctcctgttccgaccctgccgcttaccggatacctgtccgcctttctcccttcgggaagcgtggcgctttctcatagctcacgctgtaggtatctcagttcggtgtaggtcgttcgctccaagctgggctgtgtgcacgaaccccccgttcagcccgaccgctgcgccttatccggtaactatcgtcttgagtccaacccggtaagacacgacttatcgccactggcagcagccactggtaacaggattagcagagcgaggtatgtaggcggtgctacagagttcttgaagtggtggcctaactacggctacactagaagaacagtatttggtatctgcgctctgctgaagccagttaccttcggaaaaagagttggtagctcttgatccggcaaacaaaccaccgctggtagcggtggtttttttgtttgcaagcagcagattacgcgcagaaaaaaaggatctcaagaagatcctttgatcttttctacggggtctgacgctcagtggaacgaaaactcacgttaagggattttggtcatg

SEQ ID NO: 23 - DNA, 3711 bp, synthetic construct
  source 1..3711: mol_type = other DNA
atgtttgtttttcttgttttattgccactagtctctagtcagtgtgttaatcttacaaccagaactcaattaccccctgcatacactaattctttcacacgtggtgtttattaccctgacaaagttttcagatcctcagttttacattcaactcaggatttgttcttacctttcttttccaatgttacttggttccatgctatacatgtctctgggaccaatggtactaagaggtttgataaccctgtcctaccatttaatgatggtgtttattttgcttccactgagaagtctaacataataagaggctggatctttggtactactttagattcgaagacccagtccctacttattgttaataacgctactaatgttgttattaaagtctgtgaatttcaattttgtaatgatccatttttgggtgtttattaccacaaaaacaacaaaagttggatggaaagtgagttcagagtttattctagtgcgaataattgcacttttgaatatgtctctcagccttttcttatggaccttgaaggaaaacagggtaatttcaaaaatcttagggaatttgtgtttaagaatattgatggttattttaaaatatattctaagcacacgcctattaatttagtgcgtgatctccctcagggtttttcggctttagaaccattggtagatttgccaataggtattaacatcactaggtttcaaactttacttgctttacatagaagttatttgactcctggtgattcttcttcaggttggacagctggtgctgcagcttattatgtgggttatcttcaacctaggacttttctattaaaatataatgaaaatggaaccattacagatgctgtagactgtgcacttgaccctctctcagaaacaaagtgtacgttgaaatccttcactgtagaaaaaggaatctatcaaacttctaactttagagtccaaccaacagaatctattgttagatttcctaatattacaaacttgtgcccttttggtgaagtttttaacgccaccagatttgcatctgtttatgcttggaacaggaagagaatcagcaactgtgttgctgattattctgtcctatataattccgcatcattttccacttttaagtgttatggagtgtctcctactaaattaaatgatctctgctttactaatgtctatgcagattcatttgtaattagaggtgatgaagtcagacaaatcgctccagggcaaactggaaagattgctgattataattataaattaccagatgattttacaggctgcgttatagcttggaattctaacaatcttgattctaaggttggtggtaattataattacctgtatagattgtttaggaagtctaatctcaaaccttttgagagagatatttcaactgaaatctatcaggccggtagcacaccttgtaatggtgttgaaggttttaattgttactttcctttacaatcatatggtttccaacccactaatggtgttggttaccaaccatacagagtagtagtactttcttttgaacttctacatgcaccagcaactgtttgtggacctaaaaagtctactaatttggttaaaaacaaatgtgtcaatttcaacttcaatggtttaacaggcacaggtgttcttactgagtctaacaaaaagtttctgcctttccaacaatttggcagagacattgctgacactactgatgctgtccgtgatccacagacacttgagattcttgacattacaccatgttcttttggtggtgtcagtgttataacaccaggaacaaatacttctaaccaggttgctgttctttatcaggatgttaactgcacagaagtccctgttgctattcatgcagatcaacttactcctacttggcgtgtttattctacaggttctaatgtttttcaaacacgtgcaggctgtttaataggggctgaacatgtcaacaactcatatgagtgtgacatacccattggtgcaggtatatgcgctagttatcagactcagactaattctcctggcagcgccagcagtgtagctagtcaatccatcattgcctacactatgtcacttggtgcagaaaattcagttgcttactctaataactctattgccatacccacaaattttactattagtgttaccacagaaattctaccagtgtctatgaccaagacatcagtagattgtacaatgtacatttgtggtgattcaactgaatgcagcaatcttttgttgcaatatggcagtttttgtacacaattaaaccgtgctttaactgggatagctgttgaacaagacaaaaacacccaagaagtttttgcacaagtcaaacaaatttacaaaacaccaccaattaaagattttggtggttttaatttttcacaaatattaccagatccatcaaaaccaagcaagaggtcatttattgaagatctacttttcaacaaagtgacacttgcagatgctggcttcatcaaacaatatggtgattgccttggtgatattgctgctagggacctcatttgtgcacaaaagtttaacggccttactgttttgccacctttgctcacagatgaaatgattgctcaatacacttctgcactgttagcgggtacaatcacttctggttggacctttggtgcaggtgctgcattacaaataccatttgctatgcaaatggcttataggtttaatggtattggagttacacagaatgttctctatgagaaccaaaaattgattgccaaccaatttaatagtgccattggcaaaattcaagactcactttcttccacagcaagtgcacttggaaaacttcaagatgtggtcaaccaaaatgcacaagctttaaacacgcttgttaaacaacttagctccaattttggtgcaatttcaagtgttttaaatgatatcctttcacgtcttgaccctcccgaggctgaagtgcaaattgataggttgatcacaggcagacttcaaagtttgcagacatatgtgactcaacaattaattagagctgcagaaatcagagcttctgctaatcttgctgctactaaaatgtcagagtgtgtacttggacaatcaaaaagagttgatttttgtggaaagggctatcatcttatgtccttccctcagtcagcacctcatggtgtagtcttcttgcatgtgacttatgtccctgcacaagaaaagaacttcacaactgctcctgccatttgtcatgatggaaaagcacactttcctcgtgaaggtgtctttgtttcaaatggcacacactggtttgtaacacaaaggaatttttatgaaccacaaatcattactacagacaacacatttgtgtctggtaactgtgatgttgtaataggaattgtcaacaacacagtttatgatcctttgcaacctgaattagactcattcaaggaggagttagataaatattttaagaatcatacatcaccagatgttgatttaggtgacatctctggcattaatgcttcagttgtaaacattcaaaaagaaattgaccgcctcaatgaggttgccaagaatttaaatgaatctctcatcgatctccaagaacttggaaagtatgagcagtatataaaatggccatggtacatttggctaggttttatagctggcttgattgccatagtaatggtgacaattatgctttgctgttaa

SEQ ID NO: 24 - DNA, 4044 bp, synthetic construct
  source 1..4044: mol_type = other DNA
agattatcaaaaaggatcttcacctagatccttttaaattaaaaatgaagttttaaatcaatctaaagtatatatgagtaaacttggtctgacagttattagaaaaattcatccagcagacgataaaacgcaatacgctggctatccggtgccgcaatgccatacagcaccagaaaacgatccgcccattcgccgcccagttcttccgcaatatcacgggtggccagcgcaatatcctgataacgatccgccacgcccagacggccgcaatcaataaagccgctaaaacggccattttccaccataatgttcggcaggcacgcatcaccatgggtcaccaccagatcttcgccatccggcatgctcgctttcagacgcgcaaacagctctgccggtgccaggccctgatgttcttcatccagatcatcctgatccaccaggcccgcttccatacgggtacgcgcacgttcaatacgatgtttcgcctgatgatcaaacggacaggtcgccgggtccagggtatgcagacgacgcatggcatccgccataatgctcactttttctgccggcgccagatggctagacagcagatcctgacccggcacttcgcccagcagcagccaatcacggcccgcttcggtcaccacatccagcaccgccgcacacggaacaccggtggtggccagccagctcagacgcgccgcttcatcctgcagctcgttcagcgcaccgctcagatcggttttcacaaacagcaccggacgaccctgcgcgctcagacgaaacaccgccgcatcagagcagccaatggtctgctgcgcccaatcatagccaaacagacgttccacccacgctgccgggctacccgcatgcaggccatcctgttcaatcatactcttcctttttcaatattattgaagcatttatcagggttattgtctcatgagcggatacatatttgaatgtatttagaaaaataaacaaataggggttccgcgcacatttccccgaaaagtgccacctaaattgtaagcgttaatattttgttaaaattcgcgttaaatttttgttaaatcagctcattttttaaccaataggccgaaatcggcaaaatcccttataaatcaaaagaatagaccgagatagggttgagtggccgctacagggcgctcccattcgccattcaggctgcgcaactgttgggaagggcgtttcggtgcgggcctcttcgctattacgccagctggcgaaagggggatgtgctgcaaggcgattaagttgggtaacgccagggttttcccagtcacgacgttgtaaaacgacggccagtgagcgcgacgtaatacgactcactatagggcgaattgaaggaaggccgtcaaggccgcatgggaagccctcgaccgtcgattgtccactggtcaacaatagatgacttacaactaatcggaaggtgcagagactcgacgggagctaccctaacgtcaagacgagggtaaagagagagtccaattctcaaagccaataggcagtagcgaaagctgcaagagaatgaaaatccgttgaccttaaacggtcgtgtgggttcaagtccctccacccccacgccggaaacgcaatagccgaaaaacaaaaaacaaaaaaaacaaaaaaaaaaccaaaaaaacaaaacacaacgttactggccgaagccgcttggaataaggccggtgtgcgtttgtctatatgttattttccaccatattgccgtcttttggcaatgtgagggcccggaaacctggccctgtcttcttgacgagcattcctaggggtctttcccctctcgccaaaggaatgcaaggtctgttgaatgtcgtgaaggaagcagttcctctggaagcttcttgaagacaaacaacgtctgtagcgaccctttgcaggcagcggaaccccccacctggcgacaggtgcctctgcggccaaaagccacgtgtataagatacacctgcaaaggcggcacaaccccagtgccacgttgtgagttggatagttgtggaaagagtcaaatggctctcctcaagcgtattcaacaaggggctgaaggatgcccagaaggtaccccattgtatgggatctgatctggggcctcggtgcacatgctttacatgtgtttagtcgaggttaaaaaacgtctaggccccccgaaccacggggacgtggttttcctttgaaaaacacgatgataatagccaccatgtttgtttttcttgttttattgccactagtctctagtcagtgtagagtccaaccaacagaatctattgttagatttcctaatattacaaacttgtgcccttttggtgaagtttttaacgccaccagatttgcatctgtttatgcttggaacaggaagagaatcagcaactgtgttgctgattattctgtcctatataattccgcatcattttccacttttaagtgttatggagtgtctcctactaaattaaatgatctctgctttactaatgtctatgcagattcatttgtaattagaggtgatgaagtcagacaaatcgctccagggcaaactggaaagattgctgattataattataaattaccagatgattttacaggctgcgttatagcttggaattctaacaatcttgattctaaggttggtggtaattataattacctgtatagattgtttaggaagtctaatctcaaaccttttgagagagatatttcaactgaaatctatcaggccggtagcacaccttgtaatggtgttgaaggttttaattgttactttcctttacaatcatatggtttccaacccactaatggtgttggttaccaaccatacagagtagtagtactttcttttgaacttctacatgcaccagcaactgtttgtggacctaaaaagtctactaatttggttaaaaacaaatgtgtcaatttctaaaaaaaacaaaaaacaaaacggctattatgcgttaccggcgagacgctacggacttaaataattgagccttaaagaagaaattctttaagtggatgctctcaaactcagggaaacctaaatctagttatagacaaggcaatcctgagccaagccgaagtagtaattagtaagaccagtggacaatcgacggataacagcatatctagctgggcctcatgggccttcctttcactgcccgctttccagtcgggaaacctgtcgtgccagctgcattaacatggtcatagctgtttccttgcgtattgggcgctctccgcttcctcgctcactgactcgctgcgctcggtcgttcgggtaaagcctggggtgcctaatgagcaaaaggccagcaaaaggccaggaaccgtaaaaaggccgcgttgctggcgtttttccataggctccgcccccctgacgagcatcacaaaaatcgacgctcaagtcagaggtggcgaaacccgacaggactataaagataccaggcgtttccccctggaagctccctcgtgcgctctcctgttccgaccctgccgcttaccggatacctgtccgcctttctcccttcgggaagcgtggcgctttctcatagctcacgctgtaggtatctcagttcggtgtaggtcgttcgctccaagctgggctgtgtgcacgaaccccccgttcagcccgaccgctgcgccttatccggtaactatcgtcttgagtccaacccggtaagacacgacttatcgccactggcagcagccactggtaacaggattagcagagcgaggtatgtaggcggtgctacagagttcttgaagtggtggcctaactacggctacactagaagaacagtatttggtatctgcgctctgctgaagccagttaccttcggaaaaagagttggtagctcttgatccggcaaacaaaccaccgctggtagcggtggtttttttgtttgcaagcagcagattacgcgcagaaaaaaaggatctcaagaagatcctttgatcttttctacggggtctgacgctcagtggaacgaaaactcacgttaagggattttggtcatg

SEQ ID NO: 25 - DNA, 717 bp, synthetic construct
  source 1..717: mol_type = other DNA
atgtttgtttttcttgttttattgccactagtctctagtcagtgtagagtccaaccaacagaatctattgttagatttcctaatattacaaacttgtgcccttttggtgaagtttttaacgccaccagatttgcatctgtttatgcttggaacaggaagagaatcagcaactgtgttgctgattattctgtcctatataattccgcatcattttccacttttaagtgttatggagtgtctcctactaaattaaatgatctctgctttactaatgtctatgcagattcatttgtaattagaggtgatgaagtcagacaaatcgctccagggcaaactggaaagattgctgattataattataaattaccagatgattttacaggctgcgttatagcttggaattctaacaatcttgattctaaggttggtggtaattataattacctgtatagattgtttaggaagtctaatctcaaaccttttgagagagatatttcaactgaaatctatcaggccggtagcacaccttgtaatggtgttgaaggttttaattgttactttcctttacaatcatatggtttccaacccactaatggtgttggttaccaaccatacagagtagtagtactttcttttgaacttctacatgcaccagcaactgtttgtggacctaaaaagtctactaatttggttaaaaacaaatgtgtcaatttctaa

SEQ ID NO: 26 - DNA, 717 bp, synthetic construct
  source 1..717: mol_type = other DNA
atgtttgtttttcttgttttattgccactagtctctagtcagtgtagagtccaaccaacagaatctattgttagatttcctaatattacaaacttgtgcccttttggtgaagtttttaacgccaccagatttgcatccgtgtatgcttggaacaggaagagaatcagcaactgtgttgctgattattctgtcctatataattccgcatcattttccacttttaagtgttatggagtgtctcctactaaattaaatgatctctgctttactaatgtctatgcagattcatttgtaattagaggtgatgaagtcagacaaatcgctccagggcaaactggaaagattgctgattataattataaattaccagatgattttacaggctgcgttatagcttggaattctaacaatcttgattctaaggttggtggtaattataattacctgtatagattgtttaggaagtctaatctcaaaccttttgagagagatatttcaactgaaatctatcaggccggtagcacaccttgtaatggtgttgaaggttttaattgttactttcctttacaatcatatggtttccaacccactaatggtgttggttaccaaccatacagagtagtagtactttcttttgaacttctacatgcaccagcaactgtttgtggacctaaaaagtctactaatttggttaaaaacaaatgtgtcaatttctaa

SEQ ID NO: 27 - DNA, 3822 bp, synthetic construct
  source 1..3822: mol_type = other DNA
atgtttgtttttcttgttttattgccactagtctctagtcagtgtgttaatcttacaaccagaactcaattaccccctgcatacactaattctttcacacgtggtgtttattaccctgacaaagttttcagatcctcagttttacattcaactcaggacttgttcttacctttcttttccaatgttacttggttccatgctatacatgtctctgggaccaatggtactaagaggtttgataaccctgtcctaccatttaatgatggtgtttattttgcttccactgagaagtctaacataataagaggctggatttttggtactactttagattcgaagacccagtccctacttattgttaataacgctactaatgttgttattaaagtctgtgaatttcaattttgtaatgatccatttttgggtgtttattaccacaaaaacaacaaaagttggatggaaagtgagttcagagtttattctagtgcgaataattgcacttttgaatatgtctctcagccttttcttatggaccttgaaggaaaacagggtaatttcaaaaatcttagggaatttgtgtttaagaatattgatggttattttaaaatatattctaagcacacgcctattaatttagtgcgtgatctccctcagggtttttcggctttagaaccattggtagatttgccaataggtattaacatcactaggtttcaaactttacttgctttacatagaagttatttgactcctggtgattcttcttcaggttggacagctggtgctgcagcttattatgtgggttatcttcaacctaggacttttctattaaaatataatgaaaatggaaccattacagatgctgtagactgtgcacttgaccctctctcagaaacaaagtgtacgttgaaatccttcactgtagaaaaaggaatctatcaaacttctaactttagagtccaaccaacagaatctattgttagatttcctaatattacaaacttgtgcccttttggtgaagtttttaacgccaccagatttgcatccgtgtatgcttggaacaggaagagaatcagcaactgtgttgctgattattctgtcctatataattccgcatcattttccacttttaagtgttatggagtgtctcctactaaattaaatgatctctgctttactaatgtctatgcagattcatttgtaattagaggtgatgaagtcagacaaatcgctccagggcaaactggaaagattgctgattataattataaattaccagatgattttacaggctgcgttatagcttggaattctaacaatcttgattctaaggttggtggtaattataattacctgtatagattgtttaggaagtctaatctcaaaccttttgagagagatatttcaactgaaatctatcaggccggtagcacaccttgtaatggtgttgaaggttttaattgttactttcctttacaatcatatggtttccaacccactaatggtgttggttaccaaccatacagagtagtagtactttcttttgaacttctacatgcaccagcaactgtttgtggacctaaaaagtctactaatttggttaaaaacaaatgtgtcaatttcaacttcaatggtttaacaggcacaggtgttcttactgagtctaacaaaaagtttctgcctttccaacaatttggcagagacattgctgacactactgatgctgtccgtgatccacagacacttgagattcttgacattacaccatgttcttttggtggtgtcagtgttataacaccaggaacaaatacttctaaccaggttgctgttctttatcaggatgttaactgcacagaagtccctgttgctattcatgcagatcaacttactcctacttggcgtgtttattctacaggttctaatgtttttcaaacacgtgcaggctgtttaataggggctgaacatgtcaacaactcatatgagtgtgacatacccattggtgcaggtatatgcgctagttatcagactcagactaattctcctggcagcgccagcagtgtagctagtcaatccatcattgcctacactatgtcacttggtgcagaaaattcagttgcttactctaataactctattgccatacccacaaattttactattagtgttaccacagaaattctaccagtgtctatgaccaagacatcagtagattgtacaatgtacatttgtggtgattcaactgaatgcagcaatcttttgttgcaatatggcagtttttgtacacaattaaaccgtgctttaactggaatagctgttgaacaagacaaaaacacccaagaagtttttgcacaagtcaaacaaatttacaaaacaccaccaattaaagattttggtggttttaatttttcacaaatattaccagatccatcaaaaccaagcaagaggtcatttattgaagatctacttttcaacaaagtgacacttgcagatgctggcttcatcaaacaatatggtgattgccttggtgatattgctgctagggacctcatttgtgcacaaaagtttaacggccttactgttttgccacctttgctcacagatgaaatgattgctcaatacacttctgcactgttagcgggtacaatcacttctggttggacctttggtgcaggtgctgcattacaaataccatttgctatgcaaatggcttataggtttaatggtattggagttacacagaatgttctctatgagaaccaaaaattgattgccaaccaatttaatagtgctattggcaaaattcaagactcactttcttccacagcaagtgcacttggaaaacttcaagatgtggtcaaccaaaatgcacaagctttaaacacgcttgttaaacaacttagctccaattttggtgcaatttcaagtgttttaaatgatatcctttcacgtcttgaccctcccgaggctgaagtgcaaattgataggttgatcacaggcagacttcaaagtttgcagacatatgtgactcaacaattaattagagctgcagaaatcagagcttctgctaatcttgctgctactaaaatgtcagagtgtgtacttggacaatcaaaaagagttgatttttgtggaaagggctatcatcttatgtccttccctcagtcagcacctcatggtgtagtcttcttgcatgtgacttatgtccctgcacaagaaaagaacttcacaactgctcctgccatttgtcatgatggaaaagcacactttcctcgtgaaggtgtctttgtttcaaatggcacacactggtttgtaacacaaaggaatttttatgaaccacaaatcattactacagacaacacatttgtgtctggtaactgtgatgttgtaataggaattgtcaacaacacagtttatgatcctttgcaacctgaattagactcattcaaggaggagttagataaatattttaagaatcatacatcaccagatgttgatttaggtgacatctctggcattaatgcttcagttgtaaacattcaaaaagaaattgaccgcctcaatgaggttgccaagaatttaaatgaatctctcatcgatctccaagaacttggaaagtatgagcagtatataaaatggccatggtacatttggctaggttttatagctggcttgattgccatagtaatggtgacaattatgctttgctgtatgaccagttgctgtagttgtctcaagggctgttgttcttgtggatcctgctgcaaatttgatgaagacgactctgagccagtgctcaaaggagtcaaattacattacacataa

SEQ ID NO: 28 - DNA, 3822 bp, synthetic construct
  source 1..3822: mol_type = other DNA
atgtttgtttttcttgttttattgccactagtctctagtcagtgtgttaatcttacaaccagaactcaattaccccctgcatacactaattctttcacacgtggtgtttattaccctgacaaagttttcagatcctcagttttacattcaactcaggatttgttcttacctttcttttccaatgttacttggttccatgctatacatgtctctgggaccaatggtactaagaggtttgataaccctgtcctaccatttaatgatggtgtttattttgcttccactgagaagtctaacataataagaggctggatctttggtactactttagattcgaagacccagtccctacttattgttaataacgctactaatgttgttattaaagtctgtgaatttcaattttgtaatgatccatttttgggtgtttattaccacaaaaacaacaaaagttggatggaaagtgagttcagagtttattctagtgcgaataattgcacttttgaatatgtctctcagccttttcttatggaccttgaaggaaaacagggtaatttcaaaaatcttagggaatttgtgtttaagaatattgatggttattttaaaatatattctaagcacacgcctattaatttagtgcgtgatctccctcagggtttttcggctttagaaccattggtagatttgccaataggtattaacatcactaggtttcaaactttacttgctttacatagaagttatttgactcctggtgattcttcttcaggttggacagctggtgctgcagcttattatgtgggttatcttcaacctaggacttttctattaaaatataatgaaaatggaaccattacagatgctgtagactgtgcacttgaccctctctcagaaacaaagtgtacgttgaaatccttcactgtagaaaaaggaatctatcaaacttctaactttagagtccaaccaacagaatctattgttagatttcctaatattacaaacttgtgcccttttggtgaagtttttaacgccaccagatttgcatccgtgtatgcttggaacaggaagagaatcagcaactgtgttgctgattattctgtcctatataattccgcatcattttccacttttaagtgttatggagtgtctcctactaaattaaatgatctctgctttactaatgtctatgcagattcatttgtaattagaggtgatgaagtcagacaaatcgctccagggcaaactggaaagattgctgattataattataaattaccagatgattttacaggctgcgttatagcttggaattctaacaatcttgattctaaggttggtggtaattataattacctgtatagattgtttaggaagtctaatctcaaaccttttgagagagatatttcaactgaaatctatcaggccggtagcacaccttgtaatggtgttgaaggttttaattgttactttcctttacaatcatatggtttccaacccactaatggtgttggttaccaaccatacagagtagtagtactttcttttgaacttctacatgcaccagcaactgtttgtggacctaaaaagtctactaatttggttaaaaacaaatgtgtcaatttcaacttcaatggtttaacaggcacaggtgttcttactgagtctaacaaaaagtttctgcctttccaacaatttggcagagacattgctgacactactgatgctgtccgtgatccacagacacttgagattcttgacattacaccatgttcttttggtggtgtcagtgttataacaccaggaacaaatacttctaaccaggttgctgttctttatcaggatgttaactgcacagaagtccctgttgctattcatgcagatcaacttactcctacttggcgtgtttattctacaggttctaatgtttttcaaacacgtgcaggctgtttaataggggctgaacatgtcaacaactcatatgagtgtgacatacccattggtgcaggtatatgcgctagttatcagactcagactaattctcctggcagcgccagcagtgtagctagtcaatccatcattgcctacactatgtcacttggtgcagaaaattcagttgcttactctaataactctattgccatacccacaaattttactattagtgttaccacagaaattctaccagtgtctatgaccaagacatcagtagattgtacaatgtacatttgtggtgattcaactgaatgcagcaatcttttgttgcaatatggcagtttttgtacacaattaaaccgtgctttaactgggatagctgttgaacaagacaaaaacacccaagaagtttttgcacaagtcaaacaaatttacaaaacaccaccaattaaagattttggtggttttaatttttcacaaatattaccagatccatcaaaaccaagcaagaggtcatttattgaagatctacttttcaacaaagtgacacttgcagatgctggcttcatcaaacaatatggtgattgccttggtgatattgctgctagggacctcatttgtgcacaaaagtttaacggccttactgttttgccacctttgctcacagatgaaatgattgctcaatacacttctgcactgttagcgggtacaatcacttctggttggacctttggtgcaggtgctgcattacaaataccatttgctatgcaaatggcttataggtttaatggtattggagttacacagaatgttctctatgagaaccaaaaattgattgccaaccaatttaatagtgccattggcaaaattcaagactcactttcttccacagcaagtgcacttggaaaacttcaagatgtggtcaaccaaaatgcacaagctttaaacacgcttgttaaacaacttagctccaattttggtgcaatttcaagtgttttaaatgatatcctttcacgtcttgaccctcccgaggctgaagtgcaaattgataggttgatcacaggcagacttcaaagtttgcagacatatgtgactcaacaattaattagagctgcagaaatcagagcttctgctaatcttgctgctactaaaatgtcagagtgtgtacttggacaatcaaaaagagttgatttttgtggaaagggctatcatcttatgtccttccctcagtcagcacctcatggtgtagtcttcttgcatgtgacttatgtccctgcacaagaaaagaacttcacaactgctcctgccatttgtcatgatggaaaagcacactttcctcgtgaaggtgtctttgtttcaaatggcacacactggtttgtaacacaaaggaatttttatgaaccacaaatcattactacagacaacacatttgtgtctggtaactgtgatgttgtaataggaattgtcaacaacacagtttatgatcctttgcaacctgaattagactcattcaaggaggagttagataaatattttaagaatcatacatcaccagatgttgatttaggtgacatctctggcattaatgcttcagttgtaaacattcaaaaagaaattgaccgcctcaatgaggttgccaagaatttaaatgaatctctcatcgatctccaagaacttggaaagtatgagcagtatataaaatggccatggtacatttggctaggttttatagctggcttgattgccatagtaatggtgacaattatgctttgctgtatgaccagttgctgtagttgtctcaagggctgttgttcttgtggatcctgctgcaaatttgatgaagacgactctgagccagtgctcaaaggagtcaaattacattacacataa

SEQ ID NO: 29 - DNA, 3822 bp, synthetic construct
  source 1..3822: mol_type = other DNA
atgttcgttttccttgttttactgcccctcgtgtcttcacagtgtgtgaacctcaccactcgcacacagctacctcccgcgtacactaattcatttaccaggggcgtctattatcctgataaggtgttccggagttcagtgttgcatagcactcaagacctgttcctgcccttcttctccaatgtcacttggtttcatgcgatacatgtgtctggtaccaacggaacgaagagatttgataaccccgtactgccattcaatgatggcgtatactttgcttcgactgaaaaatccaacatcatcaggggctggatttttggtacaacgcttgattccaagacccagtccctccttattgtgaacaatgcgaccaacgtcgtgataaaggtctgtgagtttcagttctgcaatgacccattccttggagtgtattatcacaagaacaacaaatcgtggatggagtcagagtttagggtgtacagcagcgctaacaactgtacatttgagtatgtgagtcagccgtttctgatggatcttgagggcaaacagggcaattttaagaatctcagagaatttgtgttcaagaacattgatggttactttaagatctatagcaaacatacgccaatcaacttggttcgtgatctgccacagggatttagcgcactggaacctctcgttgacttgcccataggtattaacatcaccaggttccagacgctcttggcattacaccgtagttatctgacccccggggactccagttccggatggactgcaggagccgctgcctactatgtgggttacctccagcccaggacctttcttttgaaatataacgagaacggcacaatcactgatgctgtggactgcgcattggatcctttgtcagagactaagtgcactctgaagtcattcacagtcgagaaaggcatttaccagacgtctaacttcagggttcagcctactgagtccatcgtgagattcccaaacatcacaaatctttgtcccttcggtgaggtattcaatgcgacacgatttgcctcagtgtacgcgtggaatcggaagaggatctccaattgcgtggccgactactccgtcttatacaactcagctagcttttcaacattcaagtgctatggcgtgagccctaccaagctcaatgacctgtgcttcactaatgtgtatgccgactcttttgtcattcgcggcgacgaggtccgacaaatcgcaccgggccaaaccggtaaaattgccgactacaactacaagctgcctgacgacttcaccggctgcgtaatcgcctggaacagcaataacctggatagcaaagtgggcggaaactacaactacctgtaccggctctttagaaagtccaacctgaaaccattcgagcgcgatatctcgaccgaaatctaccaggcgggcagcaccccctgtaatggtgtagaagggttcaattgttactttccactccagagttatgggttccagccgaccaatggcgtcggttatcaaccatatcgcgttgtggtgttgtcctttgagctgctacacgccccagctacagtgtgcgggccaaagaaaagcacaaatcttgtcaagaacaaatgcgttaactttaattttaatggactcacaggtacaggagtcctgaccgaatctaataagaagttcctgccctttcaacagttcggacgagacattgccgacaccaccgatgccgttcgggacccacagaccttagaaattctggatattactccatgtagttttgggggagtgtctgtcatcacccctggcactaatacatctaaccaggttgcagtcctctaccaggatgtgaactgtaccgaagtgccggtcgctattcacgcagaccagctcactcctacctggcgggtgtactccacaggctctaacgtgtttcagacacgtgcagggtgcctaatcggcgcagagcatgtaaataactcctatgagtgtgatatccccatcggagccgggatctgcgcttcctaccagacacaaacgaatagtcccggatctgcctcaagcgtggcatctcaatccattatagcatatacgatgtcccttggagctgaaaacagcgttgcgtattcaaacaatagtatcgctattccaaccaattttacaattagcgtgaccacagaaatactccctgtgagcatgaccaagaccagtgtagactgtactatgtacatctgcggcgacagtactgagtgtagcaatctgctgctacagtatgggtccttctgtactcagcttaatcgggctctcaccggaatcgctgtagagcaagataaaaacacacaagaagtgtttgctcaagtgaagcagatctataagacacctcccatcaaggatttcggtgggttcaactttagccagattctgcccgatccgtctaaaccgtccaagcgaagtttcatcgaagacctgcttttcaataaggtcacgctggcagatgctggatttatcaaacagtacggcgactgtctgggcgatatcgccgcaagagacttgatatgcgcccaaaagtttaatgggttaaccgtccttccaccgctcctgacagacgagatgatcgcccagtatacaagtgccttattagctgggaccattactagtggatggacatttggcgccggggctgctctacagatacccttcgccatgcagatggcttaccgcttcaacggaatcggagttacccagaacgtactgtacgaaaatcagaaactcatagctaatcaatttaactctgccatcgggaagattcaggattccctgtcgtctacagcgtccgccttggggaaactgcaagatgtagtgaaccagaacgcccaggccttaaatactctggtcaagcagttatcttcaaatttcggagcaattagctctgtgttgaacgatattctttccaggctggaccctccagaagccgaagtgcaaatagaccggctcatcacggggcgcttgcaaagcctgcaaacctatgtcacccagcaactgattcgagcagccgagatccgggccagtgctaatctggccgccacaaaaatgagcgagtgcgtcctcgggcagagcaaacgcgtagacttctgcggtaaaggctatcacctgatgagcttccctcagagcgcaccccacggggtggtcttcctccacgttacctacgtccctgcgcaggagaagaacttcactacggcccctgcaatttgccacgatggcaaggcccactttcccagggagggggtcttcgtttccaacgggactcattggttcgtgactcagagaaatttttatgaacctcagatcattaccactgataatacattcgtgtctggcaactgtgatgtggttattgggatagttaataatacggtatacgacccactccagcccgagctggactccttcaaagaggagctggacaagtactttaaaaatcacacctcacctgatgtggacctaggtgacatatctggcataaatgctagcgtggttaacattcagaaggaaatcgacagactcaacgaggtggccaaaaatctgaacgagagtctgatcgacctgcaggagttgggaaaatatgaacagtacatcaaatggccatggtacatctggctgggcttcatagcaggcctgatcgccatcgtcatggtgactattatgctgtgctgcatgacatcctgttgtagctgtttgaaggggtgttgctcctgcggctcatgctgcaaattcgacgaggacgattcagaacctgtgctgaagggagtgaagctgcattacacataa

SEQ ID NO: 30 - DNA, 717 bp, synthetic construct
  source 1..717: mol_type = other DNA
atgttcgttttccttgttttactgcccctcgtgtcttcacagtgtagggttcagcctactgagtccatcgtgagattcccaaacatcacaaatctttgtcccttcggtgaggtattcaatgcgacacgatttgcctcagtgtacgcgtggaatcggaagaggatctccaattgcgtggccgactactccgtcttatacaactcagctagcttttcaacattcaagtgctatggcgtgagccctaccaagctcaatgacctgtgcttcactaatgtgtatgccgactcttttgtcattcgcggcgacgaggtccgacaaatcgcaccgggccaaaccggtaaaattgccgactacaactacaagctgcctgacgacttcaccggctgcgtaatcgcctggaacagcaataacctggatagcaaagtgggcggaaactacaactacctgtaccggctctttagaaagtccaacctgaaaccattcgagcgcgatatctcgaccgaaatctaccaggcgggcagcaccccctgtaatggtgtagaagggttcaattgttactttccactccagagttatgggttccagccgaccaatggcgtcggttatcaaccatatcgcgttgtggtgttgtcctttgagctgctacacgccccagctacagtgtgcgggccaaagaaaagcacaaatcttgtcaagaacaaatgcgttaacttttaa

SEQ ID NO: 31 - DNA, 552 bp, synthetic construct
  source 1..552: mol_type = other DNA
acgttactggccgaagccgcttggaataaggccggtgtgcgtttgtctatatgttattttccaccatattgccgtcttttggcaatgtgagggcccggaaacctggccctgtcttcttgacgagcattcctaggggtctttcccctctcgccaaaggaatgcaaggtctgttgaatgtcgtgaaggaagcagttcctctggaagcttcttgaagacaaacaacgtctgtagcgaccctttgcaggcagcggaaccccccacctggcgacaggtgcctctgcggccaaaagccacgtgtataagatacacctgcaaaggcggcacaaccccagtgccacgttgtgagttggatagttgtggaaagagtcaaatggctctcctcaagcgtattcaacaaggggctgaaggatgcccagaaggtaccccattgtatgggatctgatctggggcctcggtgcacatgctttacatgtgtttagtcgaggttaaaaaacgtctaggccccccgaaccacggggacgtggttttcctttgaaaaacacgatgataata

SEQ ID NO: 32 - DNA, 37 bp, synthetic construct
  source 1..37: mol_type = other DNA
actcttctggtccccacagactcagagagaacccacc

SEQ ID NO: 33 - DNA, 110 bp, synthetic construct
  source 1..110: mol_type = other DNA
gctggagcctcggtagccgttcctcctgcccgctgggcctcccaacgggccctcctcccctccttgcaccggcccttcctggtctttgaataaagtctgagtgggcagca

SEQ ID NO: 34-44 - skipped (11 entries)

SEQ ID NO: 45 - DNA, 741 bp, synthetic construct
  source 1..741: mol_type = other DNA
ttaaaacagcctgtgggttgatcccacccacaggcccattgggcgctagcactctggtatcacggtacctttgtgcgcctgttttataccccctcccccaactgtaacttagaagtaacacacaccgatcaacagtcagcgtggcacaccagccacgttttgatcaagcacttctgttaccccggactgagtatcaatagactgctcacgcggttgaaggagaaagcgttcgttatccggccaactacttcgaaaaacctagtaacaccgtggaagttgcagagtgtttcgctcagcactaccccagtgtagatcaggtcgatgagtcaccgcattccccacgggcgaccgtggcggtggctgcgttggcggcctgcccatggggaaacccatgggacgctctaatacagacatggtgcgaagagtctattgagctagttggtagtcctccggcccctgaatgcggctaatcctaactgcggagcacacaccctcaagccagagggcagtgtgtcgtaacgggcaactctgcagcggaaccgactactttgggtgtccgtgtttcattttattcctatactggctgcttatggtgacaattgagagatcgttaccatatagctattggattggccatccggtgactaatagagctattatatatccctttgttgggtttataccacttagcttgaaagaggttaaaacattacaattcattgttaagttgaatacagcaaa

SEQ ID NO: 46 - DNA, 1229 bp, synthetic construct
  source 1..1229: mol_type = other DNA
cgcggatcctaatacgactcactatagggaatagccgaaaaacaaaaaacaaaaaaaacaaaaaaaaaaccaaaaaaacaaaacacaacgttactggccgaagccgcttggaataaggccggtgtgcgtttgtctatatgttattttccaccatattgccgtcttttggcaatgtgagggcccggaaacctggccctgtcttcttgacgagcattcctaggggtctttcccctctcgccaaaggaatgcaaggtctgttgaatgtcgtgaaggaagcagttcctctggaagcttcttgaagacaaacaacgtctgtagcgaccctttgcaggcagcggaaccccccacctggcgacaggtgcctctgcggccaaaagccacgtgtataagatacacctgcaaaggcggcacaaccccagtgccacgttgtgagttggatagttgtggaaagagtcaaatggctctcctcaagcgtattcaacaaggggctgaaggatgcccagaaggtaccccattgtatgggatctgatctggggcctcggtgcacatgctttacatgtgtttagtcgaggttaaaaaacgtctaggccccccgaaccacggggacgtggttttcctttgaaaaacacgatgataatagccaccatgggagtcaaagttctgtttgccctgatctgcatcgctgtggccgaggccaagcccaccgagaacaacgaagacttcaacatcgtggccgtggccagcaacttcgcgaccacggatctcgatgctgaccgcgggaagttgcccggcaagaagctgccgctggaggtgctcaaagagatggaagccaatgcccggaaagctggctgcaccaggggctgtctgatctgcctgtcccacatcaagtgcacgcccaagatgaagaagttcatcccaggacgctgccacacctacgaaggcgacaaagagtccgcacagggcggcataggcgaggcgatcgtcgacattcctgagattcctgggttcaaggacttggagcccatggagcagttcatcgcacaggtcgatctgtgtgtggactgcacaactggctgcctcaaagggcttgccaacgtgcagtgttctgacctgctcaagaagtggctgccgcaacgctgtgcgacctttgccagcaagatccagggccaggtggacaagatcaagggggccggtggtgactaaaaaaaacaaaaaacaaaacggctatt

SEQ ID NO: 47 - DNA, 30 bp, synthetic construct
  source 1..30: mol_type = other DNA
gtttttcggctattcccaatagccgttttg

SEQ ID NO: 48 - DNA, 732 bp, synthetic construct
  source 1..732: mol_type = other DNA
atgtaccggatgcagttgttgtcctgtatagctctttcccttgcattggtcactaattctagagtccaaccaacagaatctattgttagatttcctaatattacaaacttgtgcccttttggtgaagtttttaacgccaccagatttgcatccgtgtatgcttggaacaggaagagaatcagcaactgtgttgctgattattctgtcctatataattccgcatcattttccacttttaagtgttatggagtgtctcctactaaattaaatgatctctgctttactaatgtctatgcagattcatttgtaattagaggtgatgaagtcagacaaatcgctccagggcaaactggaaagattgctgattataattataaattaccagatgattttacaggctgcgttatagcttggaattctaacaatcttgattctaaggttggtggtaattataattacctgtatagattgtttaggaagtctaatctcaaaccttttgagagagatatttcaactgaaatctatcaggccggtagcacaccttgtaatggtgttgaaggttttaattgttactttcctttacaatcatatggtttccaacccactaatggtgttggttaccaaccatacagagtagtagtactttcttttgaacttctacatgcaccagcaactgtttgtggacctaaaaagtctactaatttggttaaaaacaaatgtgtcaatttctaa

SEQ ID NO: 49 - DNA, 726 bp, synthetic construct
  source 1..726: mol_type = other DNA
atgggagtcaaagttctgtttgccctgatctgcatcgctgtggccgaggccaagagagtccaaccaacagaatctattgttagatttcctaatattacaaacttgtgcccttttggtgaagtttttaacgccaccagatttgcatccgtgtatgcttggaacaggaagagaatcagcaactgtgttgctgattattctgtcctatataattccgcatcattttccacttttaagtgttatggagtgtctcctactaaattaaatgatctctgctttactaatgtctatgcagattcatttgtaattagaggtgatgaagtcagacaaatcgctccagggcaaactggaaagattgctgattataattataaattaccagatgattttacaggctgcgttatagcttggaattctaacaatcttgattctaaggttggtggtaattataattacctgtatagattgtttaggaagtctaatctcaaaccttttgagagagatatttcaactgaaatctatcaggccggtagcacaccttgtaatggtgttgaaggttttaattgttactttcctttacaatcatatggtttccaacccactaatggtgttggttaccaaccatacagagtagtagtactttcttttgaacttctacatgcaccagcaactgtttgtggacctaaaaagtctactaatttggttaaaaacaaatgtgtcaatttctaa

SEQ ID NO: 50 - DNA, 60 bp, synthetic construct
  source 1..60: mol_type = other DNA
atgtaccggatgcagttgttgtcctgtatagctctttcccttgcattggtcactaattct

SEQ ID NO: 51 - DNA, 54 bp, synthetic construct
  source 1..54: mol_type = other DNA
atgggagtcaaagttctgtttgccctgatctgcatcgctgtggccgaggccaag

SEQ ID NO: 52 - protein, 8 aa, synthetic construct
  VARIANT 2: note = V or I
  VARIANT 4: note = Any amino acid
DXEXNPGP

SEQ ID NO: 53 - protein, 1273 aa, Severe acute respiratory syndrome coronavirus 2
MFVFLVLLPLVSSQCVNLTTRTQLPPAYTNSFTRGVYYPDKVFRSSVLHSTQDLFLPFFSNVTWFHAIHVSGTNGTKRFDNPVLPFNDGVYFASTEKSNIIRGWIFGTTLDSKTQSLLIVNNATNVVIKVCEFQFCNDPFLGVYYHKNNKSWMESEFRVYSSANNCTFEYVSQPFLMDLEGKQGNFKNLREFVFKNIDGYFKIYSKHTPINLVRDLPQGFSALEPLVDLPIGINITRFQTLLALHRSYLTPGDSSSGWTAGAAAYYVGYLQPRTFLLKYNENGTITDAVDCALDPLSETKCTLKSFTVEKGIYQTSNFRVQPTESIVRFPNITNLCPFGEVFNATRFASVYAWNRKRISNCVADYSVLYNSASFSTFKCYGVSPTKLNDLCFTNVYADSFVIRGDEVRQIAPGQTGKIADYNYKLPDDFTGCVIAWNSNNLDSKVGGNYNYLYRLFRKSNLKPFERDISTEIYQAGSTPCNGVEGFNCYFPLQSYGFQPTNGVGYQPYRVVVLSFELLHAPATVCGPKKSTNLVKNKCVNFNFNGLTGTGVLTESNKKFLPFQQFGRDIADTTDAVRDPQTLEILDITPCSFGGVSVITPGTNTSNQVAVLYQDVNCTEVPVAIHADQLTPTWRVYSTGSNVFQTRAGCLIGAEHVNNSYECDIPIGAGICASYQTQTNSPRRARSVASQSIIAYTMSLGAENSVAYSNNSIAIPTNFTISVTTEILPVSMTKTSVDCTMYICGDSTECSNLLLQYGSFCTQLNRALTGIAVEQDKNTQEVFAQVKQIYKTPPIKDFGGFNFSQILPDPSKPSKRSFIEDLLFNKVTLADAGFIKQYGDCLGDIAARDLICAQKFNGLTVLPPLLTDEMIAQYTSALLAGTITSGWTFGAGAALQIPFAMQMAYRFNGIGVTQNVLYENQKLIANQFNSAIGKIQDSLSSTASALGKLQDVVNQNAQALNTLVKQLSSNFGAISSVLNDILSRLDPPEAEVQIDRLITGRLQSLQTYVTQQLIRAAEIRASANLAATKMSECVLGQSKRVDFCGKGYHLMSFPQSAPHGVVFLHVTYVPAQEKNFTTAPAICHDGKAHFPREGVFVSNGTHWFVTQRNFYEPQIITTDNTFVSGNCDVVIGIVNNTVYDPLQPELDSFKEELDKYFKNHTSPDVDLGDISGINASVVNIQKEIDRLNEVAKNLNESLIDLQELGKYEQYIKWPWYIWLGFIAGLIAIVMVTIMLCCMTSCCSCLKGCCSCGSCCKFDEDDSEPVLKGVKLHYT

SEQ ID NO: 54 - DNA, 3819 bp, Severe acute respiratory syndrome coronavirus 2
  source 1..3819: mol_type = genomic DNA
atgtttgtttttcttgttttattgccactagtctctagtcagtgtgttaatcttacaaccagaactcaattaccccctgcatacactaattctttcacacgtggtgtttattaccctgacaaagttttcagatcctcagttttacattcaactcaggatttgttcttacctttcttttccaatgttacttggttccatgctatacatgtctctgggaccaatggtactaagaggtttgataaccctgtcctaccatttaatgatggtgtttattttgcttccactgagaagtctaacataataagaggctggatctttggtactactttagattcgaagacccagtccctacttattgttaataacgctactaatgttgttattaaagtctgtgaatttcaattttgtaatgatccatttttgggtgtttattaccacaaaaacaacaaaagttggatggaaagtgagttcagagtttattctagtgcgaataattgcacttttgaatatgtctctcagccttttcttatggaccttgaaggaaaacagggtaatttcaaaaatcttagggaatttgtgtttaagaatattgatggttattttaaaatatattctaagcacacgcctattaatttagtgcgtgatctccctcagggtttttcggctttagaaccattggtagatttgccaataggtattaacatcactaggtttcaaactttacttgctttacatagaagttatttgactcctggtgattcttcttcaggttggacagctggtgctgcagcttattatgtgggttatcttcaacctaggacttttctattaaaatataatgaaaatggaaccattacagatgctgtagactgtgcacttgaccctctctcagaaacaaagtgtacgttgaaatccttcactgtagaaaaaggaatctatcaaacttctaactttagagtccaaccaacagaatctattgttagatttcctaatattacaaacttgtgcccttttggtgaagtttttaacgccaccagatttgcatccgtgtatgcttggaacaggaagagaatcagcaactgtgttgctgattattctgtcctatataattccgcatcattttccacttttaagtgttatggagtgtctcctactaaattaaatgatctctgctttactaatgtctatgcagattcatttgtaattagaggtgatgaagtcagacaaatcgctccagggcaaactggaaagattgctgattataattataaattaccagatgattttacaggctgcgttatagcttggaattctaacaatcttgattctaaggttggtggtaattataattacctgtatagattgtttaggaagtctaatctcaaaccttttgagagagatatttcaactgaaatctatcaggccggtagcacaccttgtaatggtgttgaaggttttaattgttactttcctttacaatcatatggtttccaacccactaatggtgttggttaccaaccatacagagtagtagtactttcttttgaacttctacatgcaccagcaactgtttgtggacctaaaaagtctactaatttggttaaaaacaaatgtgtcaatttcaacttcaatggtttaacaggcacaggtgttcttactgagtctaacaaaaagtttctgcctttccaacaatttggcagagacattgctgacactactgatgctgtccgtgatccacagacacttgagattcttgacattacaccatgttcttttggtggtgtcagtgttataacaccaggaacaaatacttctaaccaggttgctgttctttatcaggatgttaactgcacagaagtccctgttgctattcatgcagatcaacttactcctacttggcgtgtttattctacaggttctaatgtttttcaaacacgtgcaggctgtttaataggggctgaacatgtcaacaactcatatgagtgtgacatacccattggtgcaggtatatgcgctagttatcagactcagactaattctcctcggcgggcacgtagtgtagctagtcaatccatcattgcctacactatgtcacttggtgcagaaaattcagttgcttactctaataactctattgccatacccacaaattttactattagtgttaccacagaaattctaccagtgtctatgaccaagacatcagtagattgtacaatgtacatttgtggtgattcaactgaatgcagcaatcttttgttgcaatatggcagtttttgtacacaattaaaccgtgctttaactgggatagctgttgaacaagacaaaaacacccaagaagtttttgcacaagtcaaacaaatttacaaaacaccaccaattaaagattttggtggttttaatttttcacaaatattaccagatccatcaaaaccaagcaagaggtcatttattgaagatctacttttcaacaaagtgacacttgcagatgctggcttcatcaaacaatatggtgattgccttggtgatattgctgctagggacctcatttgtgcacaaaagtttaacggccttactgttttgccacctttgctcacagatgaaatgattgctcaatacacttctgcactgttagcgggtacaatcacttctggttggacctttggtgcaggtgctgcattacaaataccatttgctatgcaaatggcttataggtttaatggtattggagttacacagaatgttctctatgagaaccaaaaattgattgccaaccaatttaatagtgccattggcaaaattcaagactcactttcttccacagcaagtgcacttggaaaacttcaagatgtggtcaaccaaaatgcacaagctttaaacacgcttgttaaacaacttagctccaattttggtgcaatttcaagtgttttaaatgatatcctttcacgtcttgaccctcccgaggctgaagtgcaaattgataggttgatcacaggcagacttcaaagtttgcagacatatgtgactcaacaattaattagagctgcagaaatcagagcttctgctaatcttgctgctactaaaatgtcagagtgtgtacttggacaatcaaaaagagttgatttttgtggaaagggctatcatcttatgtccttccctcagtcagcacctcatggtgtagtcttcttgcatgtgacttatgtccctgcacaagaaaagaacttcacaactgctcctgccatttgtcatgatggaaaagcacactttcctcgtgaaggtgtctttgtttcaaatggcacacactggtttgtaacacaaaggaatttttatgaaccacaaatcattactacagacaacacatttgtgtctggtaactgtgatgttgtaataggaattgtcaacaacacagtttatgatcctttgcaacctgaattagactcattcaaggaggagttagataaatattttaagaatcatacatcaccagatgttgatttaggtgacatctctggcattaatgcttcagttgtaaacattcaaaaagaaattgaccgcctcaatgaggttgccaagaatttaaatgaatctctcatcgatctccaagaacttggaaagtatgagcagtatataaaatggccatggtacatttggctaggttttatagctggcttgattgccatagtaatggtgacaattatgctttgctgtatgaccagttgctgtagttgtctcaagggctgttgttcttgtggatcctgctgcaaatttgatgaagacgactctgagccagtgctcaaaggagtcaaattacattacaca

SEQ ID NO: 55 - protein, 241 aa, synthetic construct
MGVKVLFALICIAVAEAKRVQPTESIVRFPNITNLCPFGEVFNATRFASVYAWNRKRISNCVADYSVLYNSASFSTFKCYGVSPTKLNDLCFTNVYADSFVIRGDEVRQIAPGQTGKIADYNYKLPDDFTGCVIAWNSNNLDSKVGGNYNYLYRLFRKSNLKPFERDISTEIYQAGSTPCNGVEGFNCYFPLQSYGFQPTNGVGYQPYRVVVLSFELLHAPATVCGPKKSTNLVKNKCVNF

SEQ ID NO: 56 - DNA, 723 bp, synthetic construct
  source 1..723: mol_type = other DNA
atgggagtcaaagttctgtttgccctgatctgcattgctgtggccgaggccaagagagtccaaccaacagaatctattgttagatttcctaatattacaaacttgtgcccttttggtgaagtttttaacgccaccagatttgcatccgtgtatgcttggaacaggaagagaatcagcaactgtgttgctgattattctgtcctatataattccgcatcattttccacttttaagtgttatggagtgtctcctactaaattaaatgatctctgctttactaatgtctatgcagattcatttgtaattagaggtgatgaagtcagacaaatcgctccagggcaaactggaaagattgctgattataattataaattaccagatgattttacaggctgcgttatagcttggaattctaacaatcttgattctaaggttggtggtaattataattacctgtatagattgtttaggaagtctaatctcaaaccttttgagagagatatttcaactgaaatctatcaggccggtagcacaccttgtaatggtgttgaaggttttaattgttactttcctttacaatcatatggtttccaacccactaatggtgttggttaccaaccatacagagtagtagtactttcttttgaacttctacatgcaccagcaactgtttgtggacctaaaaagtctactaatttggttaaaaacaaatgtgtcaatttc

SEQ ID NO: 57 - protein, 185 aa, synthetic construct
MGVKVLFALICIAVAEAKPTENNEDFNIVAVASNFATTDLDADRGKLPGKKLPLEVLKEMEANARKAGCTRGCLICLSHIKCTPKMKKFIPGRCHTYEGDKESAQGGIGEAIVDIPEIPGFKDLEPMEQFIAQVDLCVDCTTGCLKGLANVQCSDLLKKWLPQRCATFASKIQGQVDKIKGAGGD

SEQ ID NO: 58 - DNA, 558 bp, synthetic construct
  source 1..558: mol_type = other DNA
atgggagtcaaagttctgtttgccctgatctgcatcgctgtggccgaggccaagcccaccgagaacaacgaagacttcaacatcgtggccgtggccagcaacttcgcgaccacggatctcgatgctgaccgcgggaagttgcccggcaagaagctgccgctggaggtgctcaaagagatggaagccaatgcccggaaagctggctgcaccaggggctgtctgatctgcctgtcccacatcaagtgcacgcccaagatgaagaagttcatcccaggacgctgccacacctacgaaggcgacaaagagtccgcacagggcggcataggcgaggcgatcgtcgacattcctgagattcctgggttcaaggacttggagcccatggagcagttcatcgcacaggtcgatctgtgtgtggactgcacaactggctgcctcaaagggcttgccaacgtgcagtgttctgacctgctcaagaagtggctgccgcaacgctgtgcgacctttgccagcaagatccagggccaggtggacaagatcaagggggccggtggtgactaa

SEQ ID NO: 59 - protein, 566 aa, Influenza A virus
MKAILVVLLYTFATANADTLCIGYHANNSTDTVDTVLEKNVTVTHSVNLLEDKHNGKLCKLRGVAPLHLGKCNIAGWILGNPECESLSTASSWSYIVETPSSDNGTCYPGDFIDYEELREQLSSVSSFERFEIFPKTSSWPNHDSNKGVTAACPHAGAKSFYKNLIWLVKKGNSYPKLSKSYINDKGKEVLVLWGIHHPSTSADQQSLYQNADAYVFVGSSRYSKKFKPEIAIRPKVRDQEGRMNYYWTLVEPGDKITFEATGNLVVPRYAFAMERNAGSGIIISDTPVHDCNTTCQTPKGAINTSLPFQNIHPITIGKCPKYVKSTKLRLATGLRNIPSIQSRGLFGAIAGFIEGGWTGMVDGWYGYHHQNEQGSGYAADLKSTQNAIDEITNKVNSVIEKMNTQFTAVGKEFNHLEKRIENLNKKVDDGFLDIWTYNAELLVLLENERTLDYHDSNVKNLYEKVRSQLKNNAKEIGNGCFEFYHKCDNTCMESVKNGTYDYPKYSEEAKLNREEIDGVKLESTRIYQILAIYSTVASSLVLVVSLGAISFWMCSNGSLQCRICI

SEQ ID NO: 60 - DNA, 1698 bp, Influenza A virus
  source 1..1698: mol_type = genomic DNA
atgaaagcaatactagtagttcttctatatacatttgcaaccgctaacgctgatacattgtgtataggatatcacgcgaacaactccaccgatacagtagatacagtactagagaagaacgtaacagtaacacattctgttaatcttctagaagacaagcataacggcaaactgtgcaaactaagaggtgtagccccattgcatctaggaaagtgtaatatagctggctggattttgggaaatccagagtgtgaatcattaagtacagcaagctcctggtcctatatagtggaaacacctagtagtgataacggaacgtgttacccaggagattttatagattacgaggagctaagagagcagctgtcgtcagtatcatcatttgaaaggtttgaaattttcccgaaaacatcctcctggcccaatcacgatagtaacaaaggagtaacagcagcctgtcctcacgctggagcaaaaagcttctataaaaatttaatctggctagtgaagaagggaaattcatatccaaagctaagtaaaagttatataaacgataagggcaaggaagtactcgtactgtggggcattcatcatccatctactagtgctgatcaacaaagtttatatcaaaacgcagacgcatacgtttttgtggggtcaagtagatatagcaagaaatttaaaccagaaatagcaataagacctaaagtaagggatcaagaaggcagaatgaactattattggacactagtagaaccgggagataaaataacttttgaagcaacaggaaatctagtggttcccaggtacgcatttgcaatggaaagaaacgctggatcaggcatcattatatctgatacaccagtccacgattgtaatacaacttgtcaaacacctaaaggagctataaacaccagcttaccatttcaaaatattcatcctatcacaattggaaagtgtccaaaatacgtaaaaagtacaaaattgagattggccacaggattacgaaatattccatcaattcaatctagaggactttttggtgcaattgcaggtttcatagaaggaggctggactgggatggtagacggctggtacggttatcatcatcaaaacgaacagggaagtggatacgcagctgatcttaaaagtacacaaaacgcaattgacgagattactaataaagtaaattctgtaattgaaaaaatgaatactcagtttacagcagtagggaaagagtttaaccacctggaaaaaagaatagaaaatttaaataaaaaagtagacgacggatttcttgacatttggacttataacgccgaactattggtattactagaaaacgaaagaactctagattatcacgattcaaacgtaaaaaatttatacgaaaaagtaagaagccaacttaaaaataacgcaaaagaaataggaaacggctgttttgaattttatcacaagtgtgataatacctgcatggaaagtgttaaaaacgggacatacgattatccaaaatactcagaagaagcaaaattaaatagagaagaaatagacggcgtaaaattagaatcaacaaggatatatcaaatattagcaatatattcaactgtcgcttcttcattggtactggtagtttctctaggtgcaatatcattttggatgtgctctaacggctccctacagtgtagaatttgtata

SEQ ID NO: 61 - DNA, 74 bp, Hepatitis D virus
  source 1..74: mol_type = genomic DNA
ggccaccgacaagaggcggcagcccagaccacccgaaagaggagacgcggaccgccgcccaagcgagcagagcc

SEQ ID NO: 62 - DNA, 57 bp, Hepatitis D virus
  source 1..57: mol_type = genomic DNA
ggcagaggcggcagcccagaccacccgaaagaggagacgcggaccgccgcccgagcc

SEQ ID NO: 63 - protein, 251 aa, synthetic construct
MGVHECPAWLWLLLSLLSLPLGLPVLGARVQPTESIVRFPNITNLCPFGEVFNATRFASVYAWNRKRISNCVADYSVLYNSASFSTFKCYGVSPTKLNDLCFTNVYADSFVIRGDEVRQIAPGQTGKIADYNYKLPDDFTGCVIAWNSNNLDSKVGGNYNYLYRLFRKSNLKPFERDISTEIYQAGSTPCNGVEGFNCYFPLQSYGFQPTNGVGYQPYRVVVLSFELLHAPATVCGPKKSTNLVKNKCVNF

SEQ ID NO: 64 - protein, 243 aa, synthetic construct
MYRMQLLSCIALSLALVTNSRVQPTESIVRFPNITNLCPFGEVFNATRFASVYAWNRKRISNCVADYSVLYNSASFSTFKCYGVSPTKLNDLCFTNVYADSFVIRGDEVRQIAPGQTGKIADYNYKLPDDFTGCVIAWNSNNLDSKVGGNYNYLYRLFRKSNLKPFERDISTEIYQAGSTPCNGVEGFNCYFPLQSYGFQPTNGVGYQPYRVVVLSFELLHAPATVCGPKKSTNLVKNKCVNF

SEQ ID NO: 65 - protein, 241 aa, synthetic construct; identical to SEQ ID NO: 55

SEQ ID NO: 66 - protein, 251 aa, synthetic construct; identical to SEQ ID NO: 63

SEQ ID NO: 67 - protein, 243 aa, synthetic construct; identical to SEQ ID NO: 64

SEQ ID NO: 68 - protein, 1278 aa, synthetic construct
MYRMQLLSCIALSLALVTNSVNLTTRTQLPPAYTNSFTRGVYYPDKVFRSSVLHSTQDLFLPFFSNVTWFHAIHVSGTNGTKRFDNPVLPFNDGVYFASTEKSNIIRGWIFGTTLDSKTQSLLIVNNATNVVIKVCEFQFCNDPFLGVYYHKNNKSWMESEFRVYSSANNCTFEYVSQPFLMDLEGKQGNFKNLREFVFKNIDGYFKIYSKHTPINLVRDLPQGFSALEPLVDLPIGINITRFQTLLALHRSYLTPGDSSSGWTAGAAAYYVGYLQPRTFLLKYNENGTITDAVDCALDPLSETKCTLKSFTVEKGIYQTSNFRVQPTESIVRFPNITNLCPFGEVFNATRFASVYAWNRKRISNCVADYSVLYNSASFSTFKCYGVSPTKLNDLCFTNVYADSFVIRGDEVRQIAPGQTGKIADYNYKLPDDFTGCVIAWNSNNLDSKVGGNYNYLYRLFRKSNLKPFERDISTEIYQAGSTPCNGVEGFNCYFPLQSYGFQPTNGVGYQPYRVVVLSFELLHAPATVCGPKKSTNLVKNKCVNFNFNGLTGTGVLTESNKKFLPFQQFGRDIADTTDAVRDPQTLEILDITPCSFGGVSVITPGTNTSNQVAVLYQDVNCTEVPVAIHADQLTPTWRVYSTGSNVFQTRAGCLIGAEHVNNSYECDIPIGAGICASYQTQTNSPGSASSVASQSIIAYTMSLGAENSVAYSNNSIAIPTNFTISVTTEILPVSMTKTSVDCTMYICGDSTECSNLLLQYGSFCTQLNRALTGIAVEQDKNTQEVFAQVKQIYKTPPIKDFGGFNFSQILPDPSKPSKRSFIEDLLFNKVTLADAGFIKQYGDCLGDIAARDLICAQKFNGLTVLPPLLTDEMIAQYTSALLAGTITSGWTFGAGAALQIPFAMQMAYRFNGIGVTQNVLYENQKLIANQFNSAIGKIQDSLSSTASALGKLQDVVNQNAQALNTLVKQLSSNFGAISSVLNDILSRLDPPEAEVQIDRLITGRLQSLQTYVTQQLIRAAEIRASANLAATKMSECVLGQSKRVDFCGKGYHLMSFPQSAPHGVVFLHVTYVPAQEKNFTTAPAICHDGKAHFPREGVFVSNGTHWFVTQRNFYEPQIITTDNTFVSGNCDVVIGIVNNTVYDPLQPELDSFKEELDKYFKNHTSPDVDLGDISGINASVVNIQKEIDRLNEVAKNLNESLIDLQELGKYEQYIKWPWYIWLGFIAGLIAIVMVTIMLCCMTSCCSCLKGCCSCGSCCKFDEDDSEPVLKGVKLHYT

SEQ ID NO: 69 - protein, 1276 aa, synthetic construct
MGVKVLFALICIAVAEAKVNLTTRTQLPPAYTNSFTRGVYYPDKVFRSSVLHSTQDLFLPFFSNVTWFHAIHVSGTNGTKRFDNPVLPFNDGVYFASTEKSNIIRGWIFGTTLDSKTQSLLIVNNATNVVIKVCEFQFCNDPFLGVYYHKNNKSWMESEFRVYSSANNCTFEYVSQPFLMDLEGKQGNFKNLREFVFKNIDGYFKIYSKHTPINLVRDLPQGFSALEPLVDLPIGINITRFQTLLALHRSYLTPGDSSSGWTAGAAAYYVGYLQPRTFLLKYNENGTITDAVDCALDPLSETKCTLKSFTVEKGIYQTSNFRVQPTESIVRFPNITNLCPFGEVFNATRFASVYAWNRKRISNCVADYSVLYNSASFSTFKCYGVSPTKLNDLCFTNVYADSFVIRGDEVRQIAPGQTGKIADYNYKLPDDFTGCVIAWNSNNLDSKVGGNYNYLYRLFRKSNLKPFERDISTEIYQAGSTPCNGVEGFNCYFPLQSYGFQPTNGVGYQPYRVVVLSFELLHAPATVCGPKKSTNLVKNKCVNFNFNGLTGTGVLTESNKKFLPFQQFGRDIADTTDAVRDPQTLEILDITPCSFGGVSVITPGTNTSNQVAVLYQDVNCTEVPVAIHADQLTPTWRVYSTGSNVFQTRAGCLIGAEHVNNSYECDIPIGAGICASYQTQTNSPGSASSVASQSIIAYTMSLGAENSVAYSNNSIAIPTNFTISVTTEILPVSMTKTSVDCTMYICGDSTECSNLLLQYGSFCTQLNRALTGIAVEQDKNTQEVFAQVKQIYKTPPIKDFGGFNFSQILPDPSKPSKRSFIEDLLFNKVTLADAGFIKQYGDCLGDIAARDLICAQKFNGLTVLPPLLTDEMIAQYTSALLAGTITSGWTFGAGAALQIPFAMQMAYRFNGIGVTQNVLYENQKLIANQFNSAIGKIQDSLSSTASALGKLQDVVNQNAQALNTLVKQLSSNFGAISSVLNDILSRLDPPEAEVQIDRLITGRLQSLQTYVTQQLIRAAEIRASANLAATKMSECVLGQSKRVDFCGKGYHLMSFPQSAPHGVVFLHVTYVPAQEKNFTTAPAICHDGKAHFPREGVFVSNGTHWFVTQRNFYEPQIITTDNTFVSGNCDVVIGIVNNTVYDPLQPELDSFKEELDKYFKNHTSPDVDLGDISGINASVVNIQKEIDRLNEVAKNLNESLIDLQELGKYEQYIKWPWYIWLGFIAGLIAIVMVTIMLCCMTSCCSCLKGCCSCGSCCKFDEDDSEPVLKGVKLHYT

SEQ ID NO: 70 - protein, 265 aa, synthetic construct
MFVFLVLLPLVSSQCRVQPTESIVRFPNITNLCPFGEVFNATRFASVYAWNRKRISNCVADYSVLYNSASFSTFKCYGVSPTKLNDLCFTNVYADSFVIRGDEVRQIAPGQTGKIADYNYKLPDDFTGCVIAWNSNNLDSKVGGNYNYLYRLFRKSNLKPFERDISTEIYQAGSTPCNGVEGFNCYFPLQSYGFQPTNGVGYQPYRVVVLSFELLHAPATVCGPKKSTNLVKNKCVNFGYIPEAPRDGQAYVRKDGEWVLLSTFL

SEQ ID NO: 71 - protein, 1273 aa, synthetic construct; identical to SEQ ID NO: 53

SEQ ID NO: 72 - protein, 1273 aa, synthetic construct
MFVFLVLLPLVSSQCVNLTTRTQLPPAYTNSFTRGVYYPDKVFRSSVLHSTQDLFLPFFSNVTWFHAIHVSGTNGTKRFDNPVLPFNDGVYFASTEKSNIIRGWIFGTTLDSKTQSLLIVNNATNVVIKVCEFQFCNDPFLGVYYHKNNKSWMESEFRVYSSANNCTFEYVSQPFLMDLEGKQGNFKNLREFVFKNIDGYFKIYSKHTPINLVRDLPQGFSALEPLVDLPIGINITRFQTLLALHRSYLTPGDSSSGWTAGAAAYYVGYLQPRTFLLKYNENGTITDAVDCALDPLSETKCTLKSFTVEKGIYQTSNFRVQPTESIVRFPNITNLCPFGEVFNATRFASVYAWNRKRISNCVADYSVLYNSASFSTFKCYGVSPTKLNDLCFTNVYADSFVIRGDEVRQIAPGQTGKIADYNYKLPDDFTGCVIAWNSNNLDSKVGGNYNYLYRLFRKSNLKPFERDISTEIYQAGSTPCNGVEGFNCYFPLQSYGFQPTNGVGYQPYRVVVLSFELLHAPATVCGPKKSTNLVKNKCVNFNFNGLTGTGVLTESNKKFLPFQQFGRDIADTTDAVRDPQTLEILDITPCSFGGVSVITPGTNTSNQVAVLYQGVNCTEVPVAIHADQLTPTWRVYSTGSNVFQTRAGCLIGAEHVNNSYECDIPIGAGICASYQTQTNSPRRARSVASQSIIAYTMSLGAENSVAYSNNSIAIPTNFTISVTTEILPVSMTKTSVDCTMYICGDSTECSNLLLQYGSFCTQLNRALTGIAVEQDKNTQEVFAQVKQIYKTPPIKDFGGFNFSQILPDPSKPSKRSFIEDLLFNKVTLADAGFIKQYGDCLGDIAARDLICAQKFNGLTVLPPLLTDEMIAQYTSALLAGTITSGWTFGAGAALQIPFAMQMAYRFNGIGVTQNVLYENQKLIANQFNSAIGKIQDSLSSTASALGKLQDVVNQNAQALNTLVKQLSSNFGAISSVLNDILSRLDPPEAEVQIDRLITGRLQSLQTYVTQQLIRAAEIRASANLAATKMSECVLGQSKRVDFCGKGYHLMSFPQSAPHGVVFLHVTYVPAQEKNFTTAPAICHDGKAHFPREGVFVSNGTHWFVTQRNFYEPQIITTDNTFVSGNCDVVIGIVNNTVYDPLQPELDSFKEELDKYFKNHTSPDVDLGDISGINASVVNIQKEIDRLNEVAKNLNESLIDLQELGKYEQYIKWPWYIWLGFIAGLIAIVMVTIMLCCMTSCCSCLKGCCSCGSCCKFDEDDSEPVLKGVKLHYT

SEQ ID NO: 73 - protein, 1273 aa, synthetic construct; identical to SEQ ID NO: 53

SEQ ID NO: 74 - protein, 241 aa, synthetic construct; identical to SEQ ID NO: 55

SEQ ID NO: 75 - protein, 1273 aa, synthetic construct; identical to SEQ ID NO: 53

SEQ ID NO: 76 - protein, 1273 aa, synthetic construct
MFVFLVLLPLVSSQCVNFTNRTQLPSAYTNSFTRGVYYPDKVFRSSVLHSTQDLFLPFFSNVTWFHAIHVSGTNGTKRFDNPVLPFNDGVYFASTEKSNIIRGWIFGTTLDSKTQSLLIVNNATNVVIKVCEFQFCNYPFLGVYYHKNNKSWMESEFRVYSSANNCTFEYVSQPFLMDLEGKQGNFKNLSEFVFKNIDGYFKIYSKHTPINLVRDLPQGFSALEPLVDLPIGINITRFQTLLALHRSYLTPGDSSSGWTAGAAAYYVGYLQPRTFLLKYNENGTITDAVDCALDPLSETKCTLKSFTVEKGIYQTSNFRVQPTESIVRFPNITNLCPFGEVFNATRFASVYAWNRKRISNCVADYSVLYNSASFSTFKCYGVSPTKLNDLCFTNVYADSFVIRGDEVRQIAPGQTGTIADYNYKLPDDFTGCVIAWNSNNLDSKVGGNYNYLYRLFRKSNLKPFERDISTEIYQAGSTPCNGVKGFNCYFPLQSYGFQPTYGVGYQPYRVVVLSFELLHAPATVCGPKKSTNLVKNKCVNFNFNGLTGTGVLTESNKKFLPFQQFGRDIADTTDAVRDPQTLEILDITPCSFGGVSVITPGTNTSNQVAVLYQGVNCTEVPVAIHADQLTPTWRVYSTGSNVFQTRAGCLIGAEYVNNSYECDIPIGAGICASYQTQTNSPRRARSVASQSIIAYTMSLGAENSVAYSNNSIAIPTNFTISVTTEILPVSMTKTSVDCTMYICGDSTECSNLLLQYGSFCTQLNRALTGIAVEQDKNTQEVFAQVKQIYKTPPIKDFGGFNFSQILPDPSKPSKRSFIEDLLFNKVTLADAGFIKQYGDCLGDIAARDLICAQKFNGLTVLPPLLTDEMIAQYTSALLAGTITSGWTFGAGAALQIPFAMQMAYRFNGIGVTQNVLYENQKLIANQFNSAIGKIQDSLSSTASALGKLQDVVNQNAQALNTLVKQLSSNFGAISSVLNDILSRLDPPEAEVQIDRLITGRLQSLQTYVTQQLIRAAEIRASANLAAIKMSECVLGQSKRVDFCGKGYHLMSFPQSAPHGVVFLHVTYVPAQEKNFTTAPAICHDGKAHFPREGVFVSNGTHWFVTQRNFYEPQIITTDNTFVSGNCDVVIGIVNNTVYDPLQPELDSFKEELDKYFKNHTSPDVDLGDISGINASFVNIQKEIDRLNEVAKNLNESLIDLQELGKYEQYIKWPWYIWLGFIAGLIAIVMVTIMLCCMTSCCSCLKGCCSCGSCCKFDEDDSEPVLKGVKLHYT

SEQ ID NO: 77 - protein, 1273 aa, synthetic construct
MFVFLVLLPLVSSQCVNLTTRTQLPPAYTNSFTRGVYYPDKVFRSSVLHSTQDLFLPFFSNVTWFHAIHVSGTNGTKRFANPVLPFNDGVYFASTEKSNIIRGWIFGTTLDSKTQSLLIVNNATNVVIKVCEFQFCNDPFLGVYYHKNNKSWMESEFRVYSSANNCTFEYVSQPFLMDLEGKQGNFKNLREFVFKNIDGYFKIYSKHTPINLVRGLPQGFSALEPLVDLPIGINITRFQTLLALHRSYLTPGDSSSGWTAGAAAYYVGYLQPRTFLLKYNENGTITDAVDCALDPLSETKCTLKSFTVEKGIYQTSNFRVQPTESIVRFPNITNLCPFGEVFNATRFASVYAWNRKRISNCVADYSVLYNSASFSTFKCYGVSPTKLNDLCFTNVYADSFVIRGDEVRQIAPGQTGNIADYNYKLPDDFTGCVIAWNSNNLDSKVGGNYNYLYRLFRKSNLKPFERDISTEIYQAGSTPCNGVKGFNCYFPLQSYGFQPTYGVGYQPYRVVVLSFELLHAPATVCGPKKSTNLVKNKCVNFNFNGLTGTGVLTESNKKFLPFQQFGRDIADTTDAVRDPQTLEILDITPCSFGGVSVITPGTNTSNQVAVLYQGVNCTEVPVAIHADQLTPTWRVYSTGSNVFQTRAGCLIGAEHVNNSYECDIPIGAGICASYQTQTNSPRRARSVASQSIIAYTMSLGVENSVAYSNNSIAIPTNFTISVTTEILPVSMTKTSVDCTMYICGDSTECSNLLLQYGSFCTQLNRALTGIAVEQDKNTQEVFAQVKQIYKTPPIKDFGGFNFSQILPDPSKPSKRSFIEDLLFNKVTLADAGFIKQYGDCLGDIAARDLICAQKFNGLTVLPPLLTDEMIAQYTSALLAGTITSGWTFGAGAALQIPFAMQMAYRFNGIGVTQNVLYENQKLIANQFNSAIGKIQDSLSSTASALGKLQDVVNQNAQALNTLVKQLSSNFGAISSVLNDILSRLDPPEAEVQIDRLITGRLQSLQTYVTQQLIRAAEIRASANLAATKMSECVLGQSKRVDFCGKGYHLMSFPQSAPHGVVFLHVTYVPAQEKNFTTAPAICHDGKAHFPREGVFVSNGTHWFVTQRNFYEPQIITTDNTFVSGNCDVVIGIVNNTVYDPLQPELDSFKEELDKYFKNHTSPDVDLGDISGINASVVNIQKEIDRLNEVAKNLNESLIDLQELGKYEQYIKWPWYIWLGFIAGLIAIVMVTIMLCCMTSCCSCLKGCCSCGSCCKFDEDDSEPVLKGVKLHYT

SEQ ID NO: 78 - protein, 1270 aa, synthetic construct
MFVFLVLLPLVSSQCVNLTTRTQLPPAYTNSFTRGVYYPDKVFRSSVLHSTQDLFLPFFSNVTWFHAISGTNGTKRFDNPVLPFNDGVYFASTEKSNIIRGWIFGTTLDSKTQSLLIVNNATNVVIKVCEFQFCNDPFLGVYHKNNKSWMESEFRVYSSANNCTFEYVSQPFLMDLEGKQGNFKNLREFVFKNIDGYFKIYSKHTPINLVRDLPQGFSALEPLVDLPIGINITRFQTLLALHRSYLTPGDSSSGWTAGAAAYYVGYLQPRTFLLKYNENGTITDAVDCALDPLSETKCTLKSFTVEKGIYQTSNFRVQPTESIVRFPNITNLCPFGEVFNATRFASVYAWNRKRISNCVADYSVLYNSASFSTFKCYGVSPTKLNDLCFTNVYADSFVIRGDEVRQIAPGQTGKIADYNYKLPDDFTGCVIAWNSNNLDSKVGGNYNYLYRLFRKSNLKPFERDISTEIYQAGSTPCNGVEGFNCYFPLQSYGFQPTYGVGYQPYRVVVLSFELLHAPATVCGPKKSTNLVKNKCVNFNFNGLTGTGVLTESNKKFLPFQQFGRDIDDTTDAVRDPQTLEILDITPCSFGGVSVITPGTNTSNQVAVLYQGVNCTEVPVAIHADQLTPTWRVYSTGSNVFQTRAGCLIGAEHVNNSYECDIPIGAGICASYQTQTNSHRRARSVASQSIIAYTMSLGAENSVAYSNNSIAIPTNFTISVTTEILPVSMTKTSVDCTMYICGDSTECSNLLLQYGSFCIQLNRALTGIAVEQDKNTQEVFAQVKQIYKTPPIKDFGGFNFSQILPDPSKPSKRSFIEDLLFNKVTLADAGFIKQYGDCLGDIAARDLICAQKFNGLTVLPPLLTDEMIAQYTSALLAGTITSGWTFGAGAALQIPFAMQMAYRFNGIGVTQNVLYENQKLIANQFNSAIGKIQDSLSSTASALGKLQDVVNQNAQALNTLVKQLSSNFGAISSVLNDILARLDPPEAEVQIDRLITGRLQSLQTYVTQQLIRAAEIRASANLAATKMSECVLGQSKRVDFCGKGYHLMSFPQSAPHGVVFLHVTYVPAQEKNFTTAPAICHDGKAHFPREGVFVSNGTHWFVTQRNFYEPQIITTHNTFVSGNCDVVIGIVNNTVYDPLQPELDSFKEELDKYFKNHTSPDVDLGDISGINASVVNIQKEIDRLNEVAKNLNESLIDLQELGKYEQYIKWPWYIWLGFIAGLIAIVMVTIMLCCMTSCCSCLKGCCSCGSCCKFDEDDSEPVLKGVKLHYT

SEQ ID NO: 79 - protein, 241 aa, synthetic construct
MGVKVLFALICIAVAEAKRVQPTESIVRFPNITNLCPFGEVFNATRFASVYAWNRKRISNCVADYSVLYNSASFSTFKCYGVSPTKLNDLCFTNVYADSFVIRGDEVRQIAPGQTGNIADYNYKLPDDFTGCVIAWNSNNLDSKVGGNYNYLYRLFRKSNLKPFERDISTEIYQAGSTPCNGVKGFNCYFPLQSYGFQPTYGVGYQPYRVVVLSFELLHAPATVCGPKKSTNLVKNKCVNF

SEQ ID NO: 80 - protein, 1270 aa, synthetic construct
MFVFLVLLPLVSSQCVNFTTRTQLPPAYTNSFTRGVYYPDKVFRSSVLHSTQDLFLPFFSNVTWFHAIHVSGTNGTKRFANPVLPFNDGVYFASTEKSNIIRGWIFGTTLDSKTQSLLIVNNATNVVIKVCEFQFCNDPFLGVYYHKNNKSWMESEFRVYSSANNCTFEYVSQPFLMDLEGKQGNFKNLREFVFKNIDGYFKIYSKHTPINLVRGLPQGFSALEPLVDLPIGINITRFQTLHISYLTPGDSSSGWTAGAAAYYVGYLQPRTFLLKYNENGTITDAVDCALDPLSETKCTLKSFTVEKGIYQTSNFRVQPTESIVRFPNITNLCPFGEVFNATRFASVYAWNRKRISNCVADYSVLYNSASFSTFKCYGVSPTKLNDLCFTNVYADSFVIRGDEVRQIAPGQTGNIADYNYKLPDDFTGCVIAWNSNNLDSKVGGNYNYLYRLFRKSNLKPFERDISTEIYQAGSTPCNGVKGFNCYFPLQSYGFQPTYGVGYQPYRVVVLSFELLHAPATVCGPKKSTNLVKNKCVNFNFNGLTGTGVLTESNKKFLPFQQFGRDIADTTDAVRDPQTLEILDITPCSFGGVSVITPGTNTSNQVAVLYQGVNCTEVPVAIHADQLTPTWRVYSTGSNVFQTRAGCLIGAEHVNNSYECDIPIGAGICASYQTQTNSPRRARSVASQSIIAYTMSLGVENSVAYSNNSIAIPTNFTISVTTEILPVSMTKTSVDCTMYICGDSTECSNLLLQYGSFCTQLNRALTGIAVEQDKNTQEVFAQVKQIYKTPPIKDFGGFNFSQILPDPSKPSKRSFIEDLLFNKVTLADAGFIKQYGDCLGDIAARDLICAQKFNGLTVLPPLLTDEMIAQYTSALLAGTITSGWTFGAGAALQIPFAMQMAYRFNGIGVTQNVLYENQKLIANQFNSAIGKIQDSLSSTASALGKLQDVVNQNAQALNTLVKQLSSNFGAISSVLNDILSRLDPPEAEVQIDRLITGRLQSLQTYVTQQLIRAAEIRASANLAATKMSECVLGQSKRVDFCGKGYHLMSFPQSAPHGVVFLHVTYVPAQEKNFTTAPAICHDGKAHFPREGVFVSNGTHWFVTQRNFYEPQIITTDNTFVSGNCDVVIGIVNNTVYDPLQPELDSFKEELDKYFKNHTSPDVDLGDISGINASVVNIQKEIDRLNEVAKNLNESLIDLQELGKYEQYIKWPWYIWLGFIAGLIAIVMVTIMLCCMTSCCSCLKGCCSCGSCCKFDEDDSEPVLKGVKLHYT

SEQ ID NO: 81 - protein, 511 aa, synthetic construct
MGVKVLFALICIAVAEAKRVQPTESIVRFPNITNLCPFGEVFNATRFASVYAWNRKRISNCVADYSVLYNSASFSTFKCYGVSPTKLNDLCFTNVYADSFVIRGDEVRQIAPGQTGKIADYNYKLPDDFTGCVIAWNSNNLDSKVGGNYNYLYRLFRKSNLKPFERDISTEIYQAGSTPCNGVEGFNCYFPLQSYGFQPTNGVGYQPYRVVVLSFELLHAPATVCGPKKSTNLVKNKCVNFGSGRLRRGSGATNFSLLKQAGDVEENPGPMGVKVLFALICIAVAEAKRVQPTESIVRFPNITNLCPFGEVFNATRFASVYAWNRKRISNCVADYSVLYNSASFSTFKCYGVSPTKLNDLCFTNVYADSFVIRGDEVRQIAPGQTGKIADYNYKLPDDFTGCVIAWNSNNLDSKVGGNYNYLYRLFRKSNLKPFERDISTEIYQAGSTPCNGVEGFNCYFPLQSYGFQPTNGVGYQPYRVVVLSFELLHAPATVCGPKKSTNLVKNKCVNF

SEQ ID NO: 82 - protein, 781 aa, synthetic construct
MGVKVLFALICIAVAEAKRVQPTESIVRFPNITNLCPFGEVFNATRFASVYAWNRKRISNCVADYSVLYNSASFSTFKCYGVSPTKLNDLCFTNVYADSFVIRGDEVRQIAPGQTGKIADYNYKLPDDFTGCVIAWNSNNLDSKVGGNYNYLYRLFRKSNLKPFERDISTEIYQAGSTPCNGVEGFNCYFPLQSYGFQPTNGVGYQPYRVVVLSFELLHAPATVCGPKKSTNLVKNKCVNFGSGRLRRGSGATNFSLLKQAGDVEENPGPMGVKVLFALICIAVAEAKRVQPTESIVRFPNITNLCPFGEVFNATRFASVYAWNRKRISNCVADYSVLYNSASFSTFKCYGVSPTKLNDLCFTNVYADSFVIRGDEVRQIAPGQTGKIADYNYKLPDDFTGCVIAWNSNNLDSKVGGNYNYLYRLFRKSNLKPFERDISTEIYQAGSTPCNGVEGFNCYFPLQSYGFQPTNGVGYQPYRVVVLSFELLHAPATVCGPKKSTNLVKNKCVNFGSGRLRRGSGATNFSLLKQAGDVEENPGPMGVKVLFALICIAVAEAKRVQPTESIVRFPNITNLCPFGEVFNATRFASVYAWNRKRISNCVADYSVLYNSASFSTFKCYGVSPTKLNDLCFTNVYADSFVIRGDEVRQIAPGQTGKIADYNYKLPDDFTGCVIAWNSNNLDSKVGGNYNYLYRLFRKSNLKPFERDISTEIYQAGSTPCNGVEGFNCYFPLQSYGFQPTNGVGYQPYRVVVLSFELLHAPATVCGPKKSTNLVKNKCVNF

SEQ ID NO: 83 - protein, 493 aa, synthetic construct
MGVKVLFALICIAVAEAKRVQPTESIVRFPNITNLCPFGEVFNATRFASVYAWNRKRISNCVADYSVLYNSASFSTFKCYGVSPTKLNDLCFTNVYADSFVIRGDEVRQIAPGQTGKIADYNYKLPDDFTGCVIAWNSNNLDSKVGGNYNYLYRLFRKSNLKPFERDISTEIYQAGSTPCNGVEGFNCYFPLQSYGFQPTNGVGYQPYRVVVLSFELLHAPATVCGPKKSTNLVKNKCVNFGSGRLRRGSGATNFSLLKQAGDVEENPGPRVQPTESIVRFPNITNLCPFGEVFNATRFASVYAWNRKRISNCVADYSVLYNSASFSTFKCYGVSPTKLNDLCFTNVYADSFVIRGDEVRQIAPGQTGKIADYNYKLPDDFTGCVIAWNSNNLDSKVGGNYNYLYRLFRKSNLKPFERDISTEIYQAGSTPCNGVEGFNCYFPLQSYGFQPTNGVGYQPYRVVVLSFELLHAPATVCGPKKSTNLVKNKCVNF

SEQ ID NO: 84 - protein, 745 aa, synthetic construct
MGVKVLFALICIAVAEAKRVQPTESIVRFPNITNLCPFGEVFNATRFASVYAWNRKRISNCVADYSVLYNSASFSTFKCYGVSPTKLNDLCFTNVYADSFVIRGDEVRQIAPGQTGKIADYNYKLPDDFTGCVIAWNSNNLDSKVGGNYNYLYRLFRKSNLKPFERDISTEIYQAGSTPCNGVEGFNCYFPLQSYGFQPTNGVGYQPYRVVVLSFELLHAPATVCGPKKSTNLVKNKCVNFGSGRLRRGSGATNFSLLKQAGDVEENPGPRVQPTESIVRFPNITNLCPFGEVFNATRFASVYAWNRKRISNCVADYSVLYNSASFSTFKCYGVSPTKLNDLCFTNVYADSFVIRGDEVRQIAPGQTGKIADYNYKLPDDFTGCVIAWNSNNLDSKVGGNYNYLYRLFRKSNLKPFERDISTEIYQAGSTPCNGVEGFNCYFPLQSYGFQPTNGVGYQPYRVVVLSFELLHAPATVCGPKKSTNLVKNKCVNFGSGRLRRGSGATNFSLLKQAGDVEENPGPRVQPTESIVRFPNITNLCPFGEVFNATRFASVYAWNRKRISNCVADYSVLYNSASFSTFKCYGVSPTKLNDLCFTNVYADSFVIRGDEVRQIAPGQTGKIADYNYKLPDDFTGCVIAWNSNNLDSKVGGNYNYLYRLFRKSNLKPFERDISTEIYQAGSTPCNGVEGFNCYFPLQSYGFQPTNGVGYQPYRVVVLSFELLHAPATVCGPKKSTNLVKNKCVNF

SEQ ID NO: 85 - protein, 327 aa, synthetic construct
MGVKVLFALICIAVAEAKRVQPTESIVRFPNITNLCPFGEVFNATRFASVYAWNRKRISNCVADYSVLYNSASFSTFKCYGVSPTKLNDLCFTNVYADSFVIRGDEVRQIAPGQTGKIADYNYKLPDDFTGCVIAWNSNNLDSKVGGNYNYLYRLFRKSNLKPFERDISTEIYQAGSTPCNGVEGFNCYFPLQSYGFQPTNGVGYQPYRVVVLSFELLHAPATVCGPKKSTNLVKNKCVNFGSGRLRRGSGATNFSLLKQAGDVEENPGPGLEQLESIINFEKLTEWTSGLEQLESIINFEKLTEWTSGLEQLESIINFEKLTEWTS

SEQ ID NO: 86 - protein, 510 aa, synthetic construct
MGVKVLFALICIAVAEAKRVQPTESIVRFPNITNLCPFGEVFNATRFASVYAWNRKRISNCVADYSVLYNSASFSTFKCYGVSPTKLNDLCFTNVYADSFVIRGDEVRQIAPGQTGKIADYNYKLPDDFTGCVIAWNSNNLDSKVGGNYNYLYRLFRKSNLKPFERDISTEIYQAGSTPCNGVEGFNCYFPLQSYGFQPTNGVGYQPYRVVVLSFELLHAPATVCGPKKSTNLVKNKCVNFRRKRRSGSGATNFSLLKQAGDVEENPGPMGVKVLFALICIAVAEAKRVQPTESIVRFPNITNLCPFGEVFNATRFASVYAWNRKRISNCVADYSVLYNSASFSTFKCYGVSPTKLNDLCFTNVYADSFVIRGDEVRQIAPGQTGKIADYNYKLPDDFTGCVIAWNSNNLDSKVGGNYNYLYRLFRKSNLKPFERDISTEIYQAGSTPCNGVEGFNCYFPLQSYGFQPTNGVGYQPYRVVVLSFELLHAPATVCGPKKSTNLVKNKCVNF

SEQ ID NO: 87 - protein, 1273 aa, synthetic construct; identical to SEQ ID NO: 53

SEQ ID NO: 88 - protein, 1273 aa, synthetic construct; identical to SEQ ID NO: 53

SEQ ID NO: 89 - protein, 1273 aa, synthetic construct; identical to SEQ ID NO: 53

SEQ ID NO: 90 - protein, 1273 aa, synthetic construct; identical to SEQ ID NO: 1

SEQ ID NO: 91 - protein, 1269 aa, synthetic construct
MAISGVPVLGFFIIAVLMSAQESWAGIISRKPQPKMAQVSSSRRGVYYNDDIFRSDVLHLTQDYFLPFDSNLTQYFSLNVDSDRYTYFDNPILDFGDGVYFAATEKSNVIRGWIFGSSFDNTTQSAVIVNNSTHIIIRVCNFNLCKEPMYTVSRGTQQNAWVYQSAFNCTYDRVEKSFQLDTTPKTGNFKDLREYVFKNRDGFLSVYQTYTAVNLPRGLPTGFSVLKPILKLPFGINITSYRVVMAMFSQTTSNFLPESAAYYVGNLKYSTFMLRFNENGTITDAVDCSQNPLAELKCTIKNFTVEKGIYQTSNFRVQPTESIVRFPNITNLCPFGEVFNATKFPSVYAWERKKISNCVADYSVLYNSTFFSTFKCYGVSATKLNDLCFSNVYADSFVVKGDDVRQIAPGQTGVIADYNYKLPDDFMGCVLAWNTRNIDATSTGNYNYKYRYLRHGKLRPFERDISNVPFSPDGKPCTPPALNCYWPLNDYGFYTTTGIGYQPYRVVVLSFELLNAPATVCGPKKSTNLVKNKCVNFNFNGLTGTGVLTESNKKFLPFQQFGRDIADTTDAVRDPQTLEILDITPCSFGGVSVITPGTNTSNQVAVLYQDVNCTEVPVAIHADQLTPTWRVYSTGSNVFQTRAGCLIGAEHVNNSYECDIPIGAGICASYQTQTNSPRRARSVASQSIIAYTMSLGAENSVAYSNNSIAIPTNFTISVTTEILPVSMTKTSVDCTMYICGDSTECSNLLLQYGSFCTQLNRALTGIAVEQDKNTQEVFAQVKQIYKTPPIKDFGGFNFSQILPDPSKPSKRSFIEDLLFNKVTLADAGFIKQYGDCLGDIAARDLICAQKFNGLTVLPPLLTDEMIAQYTSALLAGTITSGWTFGAGAALQIPFAMQMAYRFNGIGVTQNVLYENQKLIANQFNSAIGKIQDSLSSTASALGKLQDVVNQNAQALNTLVKQLSSNFGAISSVLNDILSRLDKVEAEVQIDRLITGRLQSLQTYVTQQLIRAAEIRASANLAATKMSECVLGQSKRVDFCGKGYHLMSFPQSAPHGVVFLHVTYVPAQEKNFTTAPAICHDGKAHFPREGVFVSNGTHWFVTQRNFYEPQIITTDNTFVSGNCDVVIGIVNNTVYDPLQPELDSFKEELDKYFKNHTSPDVDLGDISGINASVVNIQKEIDRLNEVAKNLNESLIDLQELGKYEQYIKWPWYIWLGFIAGLIAIVMVTIMLCCMTSCCSCLKGCCSCGSCCKFDEDDSEPVLKGVKLHYT

SEQ ID NO: 92 - protein, 1268 aa, synthetic construct
MAISGVPVLGFFIIAVLMSAQESWASDLDRCTTFDDVQAPNYTQHTSSMRGVYYPDEIFRSDTLYLTQDLFLPFYSNVTGFHTINHTFGNPVIPFKDGIYFAATEKSNVVRGWVFGSTMNNKSQSVIIINNSTNVVIRACNFELCDNPFFAVSKPMGTQTHTMIFDNAFNCTFEYISDAFSLDVSEKSGNFKHLREFVFKNKDGFLYVYKGYQPIDVVRDLPSGFNTLKPIFKLPLGINITNFRAILTAFSPAQDIWGTSAAAYFVGYLKPTTFMLKYDENGTITDAVDCSQNPLAELKCSVKSFEIDKGIYQTSNFRVVPSGDVVRFPNITNLCPFGEVFNATRFASVYAWNRKRISNCVADYSVLYNSASFSTFKCYGVSPTKLNDLCFTNVYADSFVIRGDEVRQIAPGQTGKIADYNYKLPDDFTGCVIAWNSNNLDSKVGGNYNYLYRLFRKSNLKPFERDISTEIYQAGSTPCNGVEGFNCYFPLQSYGFQPTNGVGYQPYRVVVLSFELLHAPATVCGPKLSTDLIKNQCVNFNFNGLTGTGVLTPSSKRFQPFQQFGRDVSDFTDSVRDPKTSEILDISPCSFGGVSVITPGTNASSEVAVLYQDVNCTDVSTAIHADQLTPAWRIYSTGNNVFQTQAGCLIGAEHVDTSYECDIPIGAGICASYHTVSLLRSTSQKSIVAYTMSLGADSSIAYSNNTIAIPTNFSISITTEVMPVSMAKTSVDCNMYICGDSTECANLLLQYGSFCTQLNRALSGIAAEQDRNTREVFAQVKQMYKTPTLKYFGGFNFSQILPDPLKPTKRSFIEDLLFNKVTLADAGFMKQYGECLGDINARDLICAQKFNGLTVLPPLLTDDMIAAYTAALVSGTATAGWTFGAGAALQIPFAMQMAYRFNGIGVTQNVLYENQKQIANQFNKAISQIQESLTTTSTALGKLQDVVNQNAQALNTLVKQLSSNFGAISSVLNDILSRLDKVEAEVQIDRLITGRLQSLQTYVTQQLIRAAEIRASANLAATKMSECVLGQSKRVDFCGKGYHLMSFPQAAPHGVVFLHVTYVPSQERNFTTAPAICHEGKAYFPREGVFVFNGTSWFITQRNFFSPQIITTDNTFVSGNCDVVIGIINNTVYDPLQPELDSFKEELDKYFKNHTSPDVDLGDISGINASVVNIQKEIDRLNEVAKNLNESLIDLQELGKYEQYIKWPWYVWLGFIAGLIAIVMVTILLCCMTSCCSCLKGACSCGSCCKFDEDDSEPVLKGVKLHYT

SEQ ID NO: 93 - protein, 1282 aa, synthetic construct
MAISGVPVLGFFIIAVLMSAQESWAVNLTTRTQLPPAYTNSFTRGVYYPDKVFRSSVLHSTQDLFLPFFSNVTWFHAIHVSGTNGTKRFDNPVLPFNDGVYFASTEKSNIIRGWIFGTTLDSKTQSLLIVNNATNVVIKVCEFQFCNDPFLGVYYHKNNKSWMESEFRVYSSANNCTFEYVSQPFLMDLEGKQGNFKNLREFVFKNIDGYFKIYSKHTPINLVRDLPQGFSALEPLVDLPIGINITRFQTLLALHRSYLTPGDSSSGWTAGAAAYYVGYLQPRTFLLKYNENGTITDAVDCALDPLSETKCTLKSFTVEKGIYQTSNFRVQPTESIVRFPNITNLCPFGEVFNATKFPSVYAWERKKISNCVADYSVLYNSTFFSTFKCYGVSATKLNDLCFSNVYADSFVVKGDDVRQIAPGQTGVIADYNYKLPDDFMGCVLAWNTRNIDATSTGNYNYKYRYLRHGKLRPFERDISNVPFSPDGKPCTPPALNCYWPLNDYGFYTTTGIGYQPYRVVVLSFELLNAPATVCGPKKSTNLVKNKCVNFNFNGLTGTGVLTESNKKFLPFQQFGRDIADTTDAVRDPQTLEILDITPCSFGGVSVITPGTNTSNQVAVLYQDVNCTEVPVAIHADQLTPTWRVYSTGSNVFQTRAGCLIGAEHVNNSYECDIPIGAGICASYQTQTNSPRRARSVASQSIIAYTMSLGAENSVAYSNNSIAIPTNFTISVTTEILPVSMTKTSVDCTMYICGDSTECSNLLLQYGSFCTQLNRALTGIAVEQDKNTQEVFAQVKQIYKTPPIKDFGGFNFSQILPDPSKPSKRSFIEDLLFNKVTLADAGFIKQYGDCLGDIAARDLICAQKFNGLTVLPPLLTDEMIAQYTSALLAGTITSGWTFGAGAALQIPFAMQMAYRFNGIGVTQNVLYENQKLIANQFNSAIGKIQDSLSSTASALGKLQDVVNQNAQALNTLVKQLSSNFGAISSVLNDILSRLDKVEAEVQIDRLITGRLQSLQTYVTQQLIRAAEIRASANLAATKMSECVLGQSKRVDFCGKGYHLMSFPQSAPHGVVFLHVTYVPAQEKNFTTAPAICHDGKAHFPREGVFVSNGTHWFVTQRNFYEPQIITTDNTFVSGNCDVVIGIVNNTVYDPLQPELDSFKEELDKYFKNHTSPDVDLGDISGINASVVNIQKEIDRLNEVAKNLNESLIDLQELGKYEQYIKWPWYIWLGFIAGLIAIVMVTIMLCCMTSCCSCLKGCCSCGSCCKFDEDDSEPVLKGVKLHYT

SEQ ID NO: 94 - protein, 1282 aa, synthetic construct
MAISGVPVLGFFIIAVLMSAQESWAVNLTTRTQLPPAYTNSFTRGVYYPDKVFRSSVLHSTQDLFLPFFSNVTWFHAIHVSGTNGTKRFDNPVLPFNDGVYFASTEKSNIIRGWIFGTTLDSKTQSLLIVNNATNVVIKVCEFQFCNDPFLGVYYHKNNKSWMESEFRVYSSANNCTFEYVSQPFLMDLEGKQGNFKNLREFVFKNIDGYFKIYSKHTPINLVRDLPQGFSALEPLVDLPIGINITRFQTLLALHRSYLTPGDSSSGWTAGAAAYYVGYLQPRTFLLKYNENGTITDAVDCALDPLSETKCTLKSFTVEKGIYQTSNFRVQPTESIVRFPNITNLCPFGEVFNATTFPSVYAWERKRISNCVADYSVLYNSTSFSTFKCYGVSATKLNDLCFSNVYADSFVVKGDDVRQIAPGQTGVIADYNYKLPDDFLGCVLAWNTNSKDSSTSGNYNYLYRWVRRSKLNPYERDLSNDIYSPGGQSCSAVGPNCYNPLRPYGFFTTAGVGHQPYRVVVLSFELLNAPATVCGPKKSTNLVKNKCVNFNFNGLTGTGVLTESNKKFLPFQQFGRDIADTTDAVRDPQTLEILDITPCSFGGVSVITPGTNTSNQVAVLYQDVNCTEVPVAIHADQLTPTWRVYSTGSNVFQTRAGCLIGAEHVNNSYECDIPIGAGICASYQTQTNSPRRARSVASQSIIAYTMSLGAENSVAYSNNSIAIPTNFTISVTTEILPVSMTKTSVDCTMYICGDSTECSNLLLQYGSFCTQLNRALTGIAVEQDKNTQEVFAQVKQIYKTPPIKDFGGFNFSQILPDPSKPSKRSFIEDLLFNKVTLADAGFIKQYGDCLGDIAARDLICAQKFNGLTVLPPLLTDEMIAQYTSALLAGTITSGWTFGAGAALQIPFAMQMAYRFNGIGVTQNVLYENQKLIANQFNSAIGKIQDSLSSTASALGKLQDVVNQNAQALNTLVKQLSSNFGAISSVLNDILSRLDKVEAEVQIDRLITGRLQSLQTYVTQQLIRAAEIRASANLAATKMSECVLGQSKRVDFCGKGYHLMSFPQSAPHGVVFLHVTYVPAQEKNFTTAPAICHDGKAHFPREGVFVSNGTHWFVTQRNFYEPQIITTDNTFVSGNCDVVIGIVNNTVYDPLQPELDSFKEELDKYFKNHTSPDVDLGDISGINASVVNIQKEIDRLNEVAKNLNESLIDLQELGKYEQYIKWPWYIWLGFIAGLIAIVMVTIMLCCMTSCCSCLKGCCSCGSCCKFDEDDSEPVLKGVKLHYT

SEQ ID NO: 95 - protein, 1240 aa, synthetic construct
MYRMQLLSCIALSLALVTNSVNLTTRTQLPPAYTNSFTRGVYYPDKVFRSSVLHSTQDLFLPFFSNVTWFHAIHVSGTNGTKRFDNPVLPFNDGVYFASTEKSNIIRGWIFGTTLDSKTQSLLIVNNATNVVIKVCEFQFCNDPFLGVYYHKNNKSWMESEFRVYSSANNCTFEYVSQPFLMDLEGKQGNFKNLREFVFKNIDGYFKIYSKHTPINLVRDLPQGFSALEPLVDLPIGINITRFQTLLALHRSYLTPGDSSSGWTAGAAAYYVGYLQPRTFLLKYNENGTITDAVDCALDPLSETKCTLKSFTVEKGIYQTSNFRVQPTESIVRFPNITNLCPFGEVFNATRFASVYAWNRKRISNCVADYSVLYNSASFSTFKCYGVSPTKLNDLCFTNVYADSFVIRGDEVRQIAPGQTGKIADYNYKLPDDFTGCVIAWNSNNLDSKVGGNYNYLYRLFRKSNLKPFERDISTEIYQAGSTPCNGVEGFNCYFPLQSYGFQPTNGVGYQPYRVVVLSFELLHAPATVCGPKKSTNLVKNKCVNFNFNGLTGTGVLTESNKKFLPFQQFGRDIADTTDAVRDPQTLEILDITPCSFGGVSVITPGTNTSNQVAVLYQDVNCTEVPVAIHADQLTPTWRVYSTGSNVFQTRAGCLIGAEHVNNSYECDIPIGAGICASYQTQTNSPGSASSVASQSIIAYTMSLGAENSVAYSNNSIAIPTNFTISVTTEILPVSMTKTSVDCTMYICGDSTECSNLLLQYGSFCTQLNRALTGIAVEQDKNTQEVFAQVKQIYKTPPIKDFGGFNFSQILPDPSKPSKRSFIEDLLFNKVTLADAGFIKQYGDCLGDIAARDLICAQKFNGLTVLPPLLTDEMIAQYTSALLAGTITSGWTFGAGAALQIPFAMQMAYRFNGIGVTQNVLYENQKLIANQFNSAIGKIQDSLSSTASALGKLQDVVNQNAQALNTLVKQLSSNFGAISSVLNDILSRLDPPEAEVQIDRLITGRLQSLQTYVTQQLIRAAEIRASANLAATKMSECVLGQSKRVDFCGKGYHLMSFPQSAPHGVVFLHVTYVPAQEKNFTTAPAICHDGKAHFPREGVFVSNGTHWFVTQRNFYEPQIITTDNTFVSGNCDVVIGIVNNTVYDPLQPELDSFKEELDKYFKNHTSPDVDLGDISGINASVVNIQKEIDRLNEVAKNLNESLIDLQELGKYEQGYIPEAPRDGQAYVRKDGEWVLLSTFL

SEQ ID NO: 96 - protein, 1238 aa, synthetic construct
MGVKVLFALICIAVAEAKVNLTTRTQLPPAYTNSFTRGVYYPDKVFRSSVLHSTQDLFLPFFSNVTWFHAIHVSGTNGTKRFDNPVLPFNDGVYFASTEKSNIIRGWIFGTTLDSKTQSLLIVNNATNVVIKVCEFQFCNDPFLGVYYHKNNKSWMESEFRVYSSANNCTFEYVSQPFLMDLEGKQGNFKNLREFVFKNIDGYFKIYSKHTPINLVRDLPQGFSALEPLVDLPIGINITRFQTLLALHRSYLTPGDSSSGWTAGAAAYYVGYLQPRTFLLKYNENGTITDAVDCALDPLSETKCTLKSFTVEKGIYQTSNFRVQPTESIVRFPNITNLCPFGEVFNATRFASVYAWNRKRISNCVADYSVLYNSASFSTFKCYGVSPTKLNDLCFTNVYADSFVIRGDEVRQIAPGQTGKIADYNYKLPDDFTGCVIAWNSNNLDSKVGGNYNYLYRLFRKSNLKPFERDISTEIYQAGSTPCNGVEGFNCYFPLQSYGFQPTNGVGYQPYRVVVLSFELLHAPATVCGPKKSTNLVKNKCVNFNFNGLTGTGVLTESNKKFLPFQQFGRDIADTTDAVRDPQTLEILDITPCSFGGVSVITPGTNTSNQVAVLYQDVNCTEVPVAIHADQLTPTWRVYSTGSNVFQTRAGCLIGAEHVNNSYECDIPIGAGICASYQTQTNSPGSASSVASQSIIAYTMSLGAENSVAYSNNSIAIPTNFTISVTTEILPVSMTKTSVDCTMYICGDSTECSNLLLQYGSFCTQLNRALTGIAVEQDKNTQEVFAQVKQIYKTPPIKDFGGFNFSQILPDPSKPSKRSFIEDLLFNKVTLADAGFIKQYGDCLGDIAARDLICAQKFNGLTVLPPLLTDEMIAQYTSALLAGTITSGWTFGAGAALQIPFAMQMAYRFNGIGVTQNVLYENQKLIANQFNSAIGKIQDSLSSTASALGKLQDVVNQNAQALNTLVKQLSSNFGAISSVLNDILSRLDPPEAEVQIDRLITGRLQSLQTYVTQQLIRAAEIRASANLAATKMSECVLGQSKRVDFCGKGYHLMSFPQSAPHGVVFLHVTYVPAQEKNFTTAPAICHDGKAHFPREGVFVSNGTHWFVTQRNFYEPQIITTDNTFVSGNCDVVIGIVNNTVYDPLQPELDSFKEELDKYFKNHTSPDVDLGDISGINASVVNIQKEIDRLNEVAKNLNESLIDLQELGKYEQGYIPEAPRDGQAYVRKDGEWVLLSTFL

SEQ ID NO: 97 - protein, 1276 aa, synthetic construct; identical to SEQ ID NO: 69

SEQ ID NO: 98 - protein, 268 aa, synthetic construct
MGVKVLFALICIAVAEAKRVQPTESIVRFPNITNLCPFGEVFNATRFASVYAWNRKRISNCVADYSVLYNSASFSTFKCYGVSPTKLNDLCFTNVYADSFVIRGDEVRQIAPGQTGKIADYNYKLPDDFTGCVIAWNSNNLDSKVGGNYNYLYRLFRKSNLKPFERDISTEIYQAGSTPCNGVEGFNCYFPLQSYGFQPTNGVGYQPYRVVVLSFELLHAPATVCGPKKSTNLVKNKCVNFGYIPEAPRDGQAYVRKDGEWVLLSTFL

SEQ ID NO: 99 - protein, 1273 aa, synthetic construct
MFVFLVLLPLVSSQCVNLTTRTQLPPAYTNSFTRGVYYPDKVFRSSVLHSTQDLFLPFFSNVTWFHAIHVSGTNGTKRFDNPVLPFNDGVYFASTEKSNIIRGWIFGTTLDSKTQSLLIVNNATNVVIKVCEFQFCNDPFLGVYYHKNNKSWMESEFRVYSSANNCTFEYVSQPFLMDLEGKQGNFKNLREFVFKNIDGYFKIYSKHTPINLVRDLPQGFSALEPLVDLPIGINITRFQTLLALHRSYLTPGDSSSGWTAGAAAYYVGYLQPRTFLLKYNENGTITDAVDCALDPLSETKCTLKSFTVEKGIYQTSNFRVQPTESIVRFPNITNLCPFGEVFNATRFASVYAWNRKRISNCVADYSVLYNSASFSTFKCYGVSPTKLNDLCFTNVYADSFVIRGDEVRQIAPGQTGKIADYNYKLPDDFTGCVIAWNSNNLDSKVGGNYNYLYRLFRKSNLKPFERDISTEIYQAGSTPCNGVEGFNCYFPLQSYGFQPTNGVGYQPYRVVVLSFELLHAPATVCGPKKSTNLVKNKCVNFNFNGLTGTGVLTESNKKFLPFQQFGRDIADTTDAVRDPQTLEILDITPCSFGGVSVITPGTNTSNQVAVLYQGVNCTEVPVAIHADQLTPTWRVYSTGSNVFQTRAGCLIGAEHVNNSYECDIPIGAGICASYQTQTNSPGSASSVASQSIIAYTMSLGAENSVAYSNNSIAIPTNFTISVTTEILPVSMTKTSVDCTMYICGDSTECSNLLLQYGSFCTQLNRALTGIAVEQDKNTQEVFAQVKQIYKTPPIKDFGGFNFSQILPDPSKPSKRSFIEDLLFNKVTLADAGFIKQYGDCLGDIAARDLICAQKFNGLTVLPPLLTDEMIAQYTSALLAGTITSGWTFGAGAALQIPFAMQMAYRFNGIGVTQNVLYENQKLIANQFNSAIGKIQDSLSSTASALGKLQDVVNQNAQALNTLVKQLSSNFGAISSVLNDILSRLDPPEAEVQIDRLITGRLQSLQTYVTQQLIRAAEIRASANLAATKMSECVLGQSKRVDFCGKGYHLMSFPQSAPHGVVFLHVTYVPAQEKNFTTAPAICHDGKAHFPREGVFVSNGTHWFVTQRNFYEPQIITTDNTFVSGNCDVVIGIVNNTVYDPLQPELDSFKEELDKYFKNHTSPDVDLGDISGINASVVNIQKEIDRLNEVAKNLNESLIDLQELGKYEQYIKWPWYIWLGFIAGLIAIVMVTIMLCCMTSCCSCLKGCCSCGSCCKFDEDDSEPVLKGVKLHYT

SEQ ID NO: 100 - protein, 273 aa, synthetic construct
MGVKVLFALICIAVAEAKRVQPTESIVRFPNITNLCPFGEVFNATRFASVYAWNRKRISNCVADYSVLYNSASFSTFKCYGVSPTKLNDLCFTNVYADSFVIRGDEVRQIAPGQTGKIADYNYKLPDDFTGCVIAWNSNNLDSKVGGNYNYLYRLFRKSNLKPFERDISTEIYQAGSTPCNGVEGFNCYFPLQSYGFQPTNGVGYQPYRVVVLSFELLHAPATVCGPKKSTNLVKNKCVNFGGGGSGYIPEAPRDGQAYVRKDGEWVLLSTFL

SEQ ID NO: 101 - protein, 501 aa, synthetic construct
MGVKVLFALICIAVAEAKRVQPTESIVRFPNITNLCPFGEVFNATRFASVYAWNRKRISNCVADYSVLYNSASFSTFKCYGVSPTKLNDLCFTNVYADSFVIRGDEVRQIAPGQTGKIADYNYKLPDDFTGCVIAWNSNNLDSKVGGNYNYLYRLFRKSNLKPFERDISTEIYQAGSTPCNGVEGFNCYFPLQSYGFQPTNGVGYQPYRVVVLSFELLHAPATVCGPKKSTNLVKNKCVNFGGGGSGYIPEAPRDGQAYVRKDGEWVLLSTFLGGGGSRVQPTESIVRFPNITNLCPFGEVFNATRFASVYAWNRKRISNCVADYSVLYNSASFSTFKCYGVSPTKLNDLCFTNVYADSFVIRGDEVRQIAPGQTGKIADYNYKLPDDFTGCVIAWNSNNLDSKVGGNYNYLYRLFRKSNLKPFERDISTEIYQAGSTPCNGVEGFNCYFPLQSYGFQPTNGVGYQPYRVVVLSFELLHAPATVCGPKKSTNLVKNKCVNF

SEQ ID NO: 102 - protein, 404 aa, synthetic construct
MGVKVLFALICIAVAEAKRVQPTESIVRFPNITNLCPFGEVFNATRFASVYAWNRKRISNCVADYSVLYNSASFSTFKCYGVSPTKLNDLCFTNVYADSFVIRGDEVRQIAPGQTGKIADYNYKLPDDFTGCVIAWNSNNLDSKVGGNYNYLYRLFRKSNLKPFERDISTEIYQAGSTPCNGVEGFNCYFPLQSYGFQPTNGVGYQPYRVVVLSFELLHAPATVCGPKKSTNLVKNKCVNFDIIKLLNEQVNKEMNSSNLYMSMSSWCYTHSLDGAGLFLFDHAAEEYEHAKKLIVFLNENNVPVQLTSISAPEHKFESLTQIFQKAYEHEQHISESINNIVDHAIKGKDHATFNFLQWYVSEQHEEEVLFKDILDKIELIGNENHGLYLADQYVKGIAKSRKS

SEQ ID NO: 103 - protein, 409 aa, synthetic construct
MGVKVLFALICIAVAEAKRVQPTESIVRFPNITNLCPFGEVFNATRFASVYAWNRKRISNCVADYSVLYNSASFSTFKCYGVSPTKLNDLCFTNVYADSFVIRGDEVRQIAPGQTGKIADYNYKLPDDFTGCVIAWNSNNLDSKVGGNYNYLYRLFRKSNLKPFERDISTEIYQAGSTPCNGVEGFNCYFPLQSYGFQPTNGVGYQPYRVVVLSFELLHAPATVCGPKKSTNLVKNKCVNFGGGGSDIIKLLNEQVNKEMNSSNLYMSMSSWCYTHSLDGAGLFLFDHAAEEYEHAKKLIVFLNENNVPVQLTSISAPEHKFESLTQIFQKAYEHEQHISESINNIVDHAIKGKDHATFNFLQWYVSEQHEEEVLFKDILDKIELIGNENHGLYLADQYVKGIAKSRKS

SEQ ID NO: 104 - protein, 440 aa, synthetic construct
MGVKVLFALICIAVAEAKRVQPTESIVRFPNITNLCPFGEVFNATRFASVYAWNRKRISNCVADYSVLYNSASFSTFKCYGVSPTKLNDLCFTNVYADSFVIRGDEVRQIAPGQTGKIADYNYKLPDDFTGCVIAWNSNNLDSKVGGNYNYLYRLFRKSNLKPFERDISTEIYQAGSTPCNGVEGFNCYFPLQSYGFQPTNGVGYQPYRVVVLSFELLHAPATVCGPKKSTNLVKNKCVNFPGSGYIPEAPRDGQAYVRKDGEWVLLSTFLSGRSGGDIIKLLNEQVNKEMNSSNLYMSMSSWCYTHSLDGAGLFLFDHAAEEYEHAKKLIVFLNENNVPVQLTSISAPEHKFESLTQIFQKAYEHEQHISESINNIVDHAIKGKDHATFNFLQWYVSEQHEEEVLFKDILDKIELIGNENHGLYLADQYVKGIAKSRKS

SEQ ID NO: 105 - protein, 265 aa, synthetic construct
MGVKVLFALICIAVAEAKRVQPTESIVRFPNITNLCPFGEVFNATRFASVYAWNRKRISNCVADYSVLYNSASFSTFKCYGVSPTKLNDLCFTNVYADSFVIRGDEVRQIAPGQTGKIADYNYKLPDDFTGCVIAWNSNNLDSKVGGNYNYLYRLFRKSNLKPFERDISTEIYQAGSTPCNGVEGFNCYFPLQSYGFQPTNGVGYQPYRVVVLSFELLHAPATVCGPKKSTNLVKNKCVNFINHVGGTGGAIMAPVAVTRQLVGS

SEQ ID NO: 106 - protein, 270 aa, synthetic construct
MGVKVLFALICIAVAEAKRVQPTESIVRFPNITNLCPFGEVFNATRFASVYAWNRKRISNCVADYSVLYNSASFSTFKCYGVSPTKLNDLCFTNVYADSFVIRGDEVRQIAPGQTGKIADYNYKLPDDFTGCVIAWNSNNLDSKVGGNYNYLYRLFRKSNLKPFERDISTEIYQAGSTPCNGVEGFNCYFPLQSYGFQPTNGVGYQPYRVVVLSFELLHAPATVCGPKKSTNLVKNKCVNFGGGGSINHVGGTGGAIMAPVAVTRQLVGS

SEQ ID NO: 107 - protein, 265 aa, synthetic construct
MGVKVLFALICIAVAEAKINHVGGTGGAIMAPVAVTRQLVGSRVQPTESIVRFPNITNLCPFGEVFNATRFASVYAWNRKRISNCVADYSVLYNSASFSTFKCYGVSPTKLNDLCFTNVYADSFVIRGDEVRQIAPGQTGKIADYNYKLPDDFTGCVIAWNSNNLDSKVGGNYNYLYRLFRKSNLKPFERDISTEIYQAGSTPCNGVEGFNCYFPLQSYGFQPTNGVGYQPYRVVVLSFELLHAPATVCGPKKSTNLVKNKCVNF

SEQ ID NO: 108 - protein, 270 aa, synthetic construct
MGVKVLFALICIAVAEAKINHVGGTGGAIMAPVAVTRQLVGSGGGGSRVQPTESIVRFPNITNLCPFGEVFNATRFASVYAWNRKRISNCVADYSVLYNSASFSTFKCYGVSPTKLNDLCFTNVYADSFVIRGDEVRQIAPGQTGKIADYNYKLPDDFTGCVIAWNSNNLDSKVGGNYNYLYRLFRKSNLKPFERDISTEIYQAGSTPCNGVEGFNCYFPLQSYGFQPTNGVGYQPYRVVVLSFELLHAPATVCGPKKSTNLVKNKCVNF

SEQ ID NO: 109 - protein, 254 aa, synthetic construct
MGVKVLFALICIAVAEAKAKFVAAWTLKAAARVQPTESIVRFPNITNLCPFGEVFNATRFASVYAWNRKRISNCVADYSVLYNSASFSTFKCYGVSPTKLNDLCFTNVYADSFVIRGDEVRQIAPGQTGKIADYNYKLPDDFTGCVIAWNSNNLDSKVGGNYNYLYRLFRKSNLKPFERDISTEIYQAGSTPCNGVEGFNCYFPLQSYGFQPTNGVGYQPYRVVVLSFELLHAPATVCGPKKSTNLVKNKCVNF

SEQ ID NO: 110 - protein, 258 aa, synthetic construct
MGVKVLFALICIAVAEAKKSSQYIKANSKFIGITERVQPTESIVRFPNITNLCPFGEVFNATRFASVYAWNRKRISNCVADYSVLYNSASFSTFKCYGVSPTKLNDLCFTNVYADSFVIRGDEVRQIAPGQTGKIADYNYKLPDDFTGCVIAWNSNNLDSKVGGNYNYLYRLFRKSNLKPFERDISTEIYQAGSTPCNGVEGFNCYFPLQSYGFQPTNGVGYQPYRVVVLSFELLHAPATVCGPKKSTNLVKNKCVNF

SEQ ID NO: 111 - protein, 268 aa, synthetic construct; identical to SEQ ID NO: 98

SEQ ID NO: 112 - RNA, 756 nt, synthetic construct
  source 1..756: mol_type = other RNA
atgggcgtgcacgagtgccccgcctggctgtggctgctgctgagcctgctgagcctgcccctgggcctgcccgtgctgggcgccagagtccaaccaacagaatctattgttagatttcctaatattacaaacttgtgcccttttggtgaagtttttaacgccaccagatttgcatccgtgtatgcttggaacaggaagagaatcagcaactgtgttgctgattattctgtcctatataattccgcatcattttccacttttaagtgttatggagtgtctcctactaaattaaatgatctctgctttactaatgtctatgcagattcatttgtaattagaggtgatgaagtcagacaaatcgctccagggcaaactggaaagattgctgattataattataaattaccagatgattttacaggctgcgttatagcttggaattctaacaatcttgattctaaggttggtggtaattataattacctgtatagattgtttaggaagtctaatctcaaaccttttgagagagatatttcaactgaaatctatcaggccggtagcacaccttgtaatggtgttgaaggttttaattgttactttcctttacaatcatatggtttccaacccactaatggtgttggttaccaaccatacagagtagtagtactttcttttgaacttctacatgcaccagcaactgtttgtggacctaaaaagtctactaatttggttaaaaacaaatgtgtcaatttctaa

SEQ ID NO: 113 - RNA, 732 nt, synthetic construct
  source 1..732: mol_type = other RNA
atgtaccggatgcagttgttgtcctgtatagctctttcccttgcattggtcactaattctagagtccaaccaacagaatctattgttagatttcctaatattacaaacttgtgcccttttggtgaagtttttaacgccaccagatttgcatccgtgtatgcttggaacaggaagagaatcagcaactgtgttgctgattattctgtcctatataattccgcatcattttccacttttaagtgttatggagtgtctcctactaaattaaatgatctctgctttactaatgtctatgcagattcatttgtaattagaggtgatgaagtcagacaaatcgctccagggcaaactggaaagattgctgattataattataaattaccagatgattttacaggctgcgttatagcttggaattctaacaatcttgattctaaggttggtggtaattataattacctgtatagattgtttaggaagtctaatctcaaaccttttgagagagatatttcaactgaaatctatcaggccggtagcacaccttgtaatggtgttgaaggttttaattgttactttcctttacaatcatatggtttccaacccactaatggtgttggttaccaaccatacagagtagtagtactttcttttgaacttctacatgcaccagcaactgtttgtggacctaaaaagtctactaatttggttaaaaacaaatgtgtcaatttctaa

SEQ ID NO: 114 - RNA, 726 nt, synthetic construct
  source 1..726: mol_type = other RNA
atgggagtcaaagttctgtttgccctgatctgcatcgctgtggccgaggccaagagagtccaaccaacagaatctattgttagatttcctaatattacaaacttgtgcccttttggtgaagtttttaacgccaccagatttgcatccgtgtatgcttggaacaggaagagaatcagcaactgtgttgctgattattctgtcctatataattccgcatcattttccacttttaagtgttatggagtgtctcctactaaattaaatgatctctgctttactaatgtctatgcagattcatttgtaattagaggtgatgaagtcagacaaatcgctccagggcaaactggaaagattgctgattataattataaattaccagatgattttacaggctgcgttatagcttggaattctaacaatcttgattctaaggttggtggtaattataattacctgtatagattgtttaggaagtctaatctcaaaccttttgagagagatatttcaactgaaatctatcaggccggtagcacaccttgtaatggtgttgaaggttttaattgttactttcctttacaatcatatggtttccaacccactaatggtgttggttaccaaccatacagagtagtagtactttcttttgaacttctacatgcaccagcaactgtttgtggacctaaaaagtctactaatttggttaaaaacaaatgtgtcaatttctaa

SEQ ID NO: 115 - RNA, 756 nt, synthetic construct; identical to SEQ ID NO: 112
  source 1..756: mol_type = other RNA

SEQ ID NO: 116 - RNA, 732 nt, synthetic construct
  source 1..732: mol_type = other RNA
atgtaccggatgcagttgttgtcctgtatagctctttcccttgcattggtcactaattctagggttcagcctactgagtccatcgtgagattcccaaacatcacaaatctttgtcccttcggtgaggtattcaatgcgacacgatttgcctcagtgtacgcgtggaatcggaagaggatctccaattgcgtggccgactactccgtcttatacaactcagctagcttttcaacattcaagtgctatggcgtgagccctaccaagctcaatgacctgtgcttcactaatgtgtatgccgactcttttgtcattcgcggcgacgaggtccgacaaatcgcaccgggccaaaccggtaaaattgccgactacaactacaagctgcctgacgacttcaccggctgcgtaatcgcctggaacagcaataacctggatagcaaagtgggcggaaactacaactacctgtaccggctctttagaaagtccaacctgaaaccattcgagcgcgatatctcgaccgaaatctaccaggcgggcagcaccccctgtaatggtgtagaagggttcaattgttactttccactccagagttatgggttccagccgaccaatggcgtcggttatcaaccatatcgcgttgtggtgttgtcctttgagctgctacacgccccagctacagtgtgcgggccaaagaaaagcacaaatcttgtcaagaacaaatgcgttaacttttaa

SEQ ID NO: 117 - RNA, 3837 nt, synthetic construct
  source 1..3837: mol_type = other RNA
atgtaccggatgcagttgttgtcctgtatagctctttcccttgcattggtcactaattctgtgaacctcaccactcgcacacagctacctcccgcgtacactaattcatttaccaggggcgtctattatcctgataaggtgttccggagttcagtgttgcatagcactcaagacctgttcctgcccttcttctccaatgtcacttggtttcatgcgatacatgtgtctggtaccaacggaacgaagagatttgataaccccgtactgccattcaatgatggcgtatactttgcttcgactgaaaaatccaacatcatcaggggctggatttttggtacaacgcttgattccaagacccagtccctccttattgtgaacaatgcgaccaacgtcgtgataaaggtctgtgagtttcagttctgcaatgacccattccttggagtgtattatcacaagaacaacaaatcgtggatggagtcagagtttagggtgtacagcagcgctaacaactgtacatttgagtatgtgagtcagccgtttctgatggatcttgagggcaaacagggcaattttaagaatctcagagaatttgtgttcaagaacattgatggttactttaagatctatagcaaacatacgccaatcaacttggttcgtgatctgccacagggatttagcgcactggaacctctcgttgacttgcccataggtattaacatcaccaggttccagacgctcttggcattacaccgtagttatctgacccccggggactccagttccggatggactgcaggagccgctgcctactatgtgggttacctccagcccaggacctttcttttgaaatataacgagaacggcacaatcactgatgctgtggactgcgcattggatcctttgtcagagactaagtgcactctgaagtcattcacagtcgagaaaggcatttaccagacgtctaacttcagggttcagcctactgagtccatcgtgagattcccaaacatcacaaatctttgtcccttcggtgaggtattcaatgcgacacgatttgcctcagtgtacgcgtggaatcggaagaggatctccaattgcgtggccgactactccgtcttatacaactcagctagcttttcaacattcaagtgctatggcgtgagccctaccaagctcaatgacctgtgcttcactaatgtgtatgccgactcttttgtcattcgcggcgacgaggtccgacaaatcgcaccgggccaaaccggtaaaattgccgactacaactacaagctgcctgacgacttcaccggctgcgtaatcgcctggaacagcaataacctggatagcaaagtgggcggaaactacaactacctgtaccggctctttagaaagtccaacctgaaaccattcgagcgcgatatctcgaccgaaatctaccaggcgggcagcaccccctgtaatggtgtagaagggttcaattgttactttccactccagagttatgggttccagccgaccaatggcgtcggttatcaaccatatcgcgttgtggtgttgtcctttgagctgctacacgccccagctacagtgtgcgggccaaagaaaagcacaaatcttgtcaagaacaaatgcgttaactttaattttaatggactcacaggtacaggagtcctgaccgaatctaataagaagttcctgccctttcaacagttcggacgagacattgccgacaccaccgatgccgttcgggacccacagaccttagaaattctggatattactccatgtagttttgggggagtgtctgtcatcacccctggcactaatacatctaaccaggttgcagtcctctaccaggatgtgaactgtaccgaagtgccggtcgctattcacgcagaccagctcactcctacctggcgggtgtactccacaggctctaacgtgtttcagacacgtgcagggtgcctaatcggcgcagagcatgtaaataactcctatgagtgtgatatccccatcggagccgggatctgcgcttcctaccagacacaaacgaatagtcccggatctgcctcaagcgtggcatctcaatccattatagcatatacgatgtcccttggagctgaaaacagcgttgcgtattcaaacaatagtatcgctattccaaccaattttacaattagcgtgaccacagaaatactccctgtgagcatgaccaagaccagtgtagactgtactatgtacatctgcggcgacagtactgagtgtagcaatctgctgctacagtatgggtccttctgtactcagcttaatcgggctctcaccggaatcgctgtagagcaagataaaaacacacaagaagtgtttgctcaagtgaagcagatctataagacacctcccatcaaggatttcggtgggttcaactttagccagattctgcccgatccgtctaaaccgtccaagcgaagtttcatcgaagacctgcttttcaataaggtcacgctggcagatgctggatttatcaaacagtacggcgactgtctgggcgatatcgccgcaagagacttgatatgcgcccaaaagtttaatgggttaaccgtccttccaccgctcctgacagacgagatgatcgcccagtatacaagtgccttattagctgggaccattactagtggatggacatttggcgccggggctgctctacagatacccttcgccatgcagatggcttaccgcttcaacggaatcggagttacccagaacgtactgtacgaaaatcagaaactcatagctaatcaatttaactctgccatcgggaagattcaggattccctgtcgtctacagcgtccgccttggggaaactgcaagatgtagtgaaccagaacgcccaggccttaaatactctggtcaagcagttatcttcaaatttcggagcaattagctctgtgttgaacgatattctttccaggctggaccctccagaagccgaagtgcaaatagaccggctcatcacggggcgcttgcaaagcctgcaaacctatgtcacccagcaactgattcgagcagccgagatccgggccagtgctaatctggccgccacaaaaatgagcgagtgcgtcctcgggcagagcaaacgcgtagacttctgcggtaaaggctatcacctgatgagcttccctcagagcgcaccccacggggtggtcttcctccacgttacctacgtccctgcgcaggagaagaacttcactacggcccctgcaatttgccacgatggcaaggcccactttcccagggagggggtcttcgtttccaacgggactcattggttcgtgactcagagaaatttttatgaacctcagatcattaccactgataatacattcgtgtctggcaactgtgatgtggttattgggatagttaataatacggtatacgacccactccagcccgagctggactccttcaaagaggagctggacaagtactttaaaaatcacacctcacctgatgtggacctaggtgacatatctggcataaatgctagcgtggttaacattcagaaggaaatcgacagactcaacgaggtggccaaaaatctgaacgagagtctgatcgacctgcaggagttgggaaaatatgaacagtacatcaaatggccatggtacatctggctgggcttcatagcaggcctgatcgccatcgtcatggtgactattatgctgtgctgcatgacatcctgttgtagctgtttgaaggggtgttgctcctgcggctcatgctgcaaattcgacgaggacgattcagaacctgtgctgaagggagtgaagctgcattacacataa

SEQ ID NO: 118 - RNA, 3828 nt, synthetic construct
  source 1..3828: mol_type = other RNA
atgggagtcaaagttctgtttgccctgatctgcatcgctgtggccgaggccaaggttaatcttacaaccagaactcaattaccccctgcatacactaattctttcacacgtggtgtttattaccctgacaaagttttcagatcctcagttttacattcaactcaggacttgttcttacctttcttttccaatgttacttggttccatgctatacatgtctctgggaccaatggtactaagaggtttgataaccctgtcctaccatttaatgatggtgtttattttgcttccactgagaagtctaacataataagaggctggatttttggtactactttagattcgaagacccagtccctacttattgttaataacgctactaatgttgttattaaagtctgtgaatttcaattttgtaatgatccatttttgggtgtttattaccacaaaaacaacaaaagttggatggaaagtgagttcagagtttattctagtgcgaataattgcacttttgaatatgtctctcagccttttcttatggaccttgaaggaaaacagggtaatttcaaaaatcttagggaatttgtgtttaagaatattgatggttattttaaaatatattctaagcacacgcctattaatttagtgcgtgatctccctcagggtttttcggctttagaaccattggtagatttgccaataggtattaacatcactaggtttcaaactttacttgctttacatagaagttatttgactcctggtgattcttcttcaggttggacagctggtgctgcagcttattatgtgggttatcttcaacctaggacttttctattaaaatataatgaaaatggaaccattacagatgctgtagactgtgcacttgaccctctctcagaaacaaagtgtacgttgaaatccttcactgtagaaaaaggaatctatcaaacttctaactttagagtccaaccaacagaatctattgttagatttcctaatattacaaacttgtgcccttttggtgaagtttttaacgccaccagatttgcatccgtgtatgcttggaacaggaagagaatcagcaactgtgttgctgattattctgtcctatataattccgcatcattttccacttttaagtgttatggagtgtctcctactaaattaaatgatctctgctttactaatgtctatgcagattcatttgtaattagaggtgatgaagtcagacaaatcgctccagggcaaactggaaagattgctgattataattataaattaccagatgattttacaggctgcgttatagcttggaattctaacaatcttgattctaaggttggtggtaattataattacctgtatagattgtttaggaagtctaatctcaaaccttttgagagagatatttcaactgaaatctatcaggccggtagcacaccttgtaatggtgttgaaggttttaattgttactttcctttacaatcatatggtttccaacccactaatggtgttggttaccaaccatacagagtagtagtactttcttttgaacttctacatgcaccagcaactgtttgtggacctaaaaagtctactaatttggttaaaaacaaatgtgtcaatttcaacttcaatggtttaacaggcacaggtgttcttactgagtctaacaaaaagtttctgcctttccaacaatttggcagagacattgctgacactactgatgctgtccgtgatccacagacacttgagattcttgacattacaccatgttcttttggtggtgtcagtgttataacaccaggaacaaatacttctaaccaggttgctgttctttatcaggatgttaactgcacagaagtccctgttgctattcatgcagatcaacttactcctacttggcgtgtttattctacaggttctaatgtttttcaaacacgtgcaggctgtttaataggggctgaacatgtcaacaactcatatgagtgtgacatacccattggtgcaggtatatgcgctagttatcagactcagactaattctcctggcagcgccagcagtgtagctagtcaatccatcattgcctacactatgtcacttggtgcagaaaattcagttgcttactctaataactctattgccatacccacaaattttactattagtgttaccacagaaattctaccagtgtctatgaccaagacatcagtagattgtacaatgtacatttgtggtgattcaactgaatgcagcaatcttttgttgcaatatggcagtttttgtacacaattaaaccgtgctttaactggaatagctgttgaacaagacaaaaacacccaagaagtttttgcacaagtcaaacaaatttacaaaacaccaccaattaaagattttggtggttttaatttttcacaaatattaccagatccatcaaaaccaagcaagaggtcatttattgaagatctacttttcaacaaagtgacacttgcagatgctggcttcatcaaacaatatggtgattgccttggtgatattgctgctagggacctcatttgtgcacaaaagtttaacggccttactgttttgccacctttgctcacagatgaaatgattgctcaatacacttctgcactgttagcgggtacaatcacttctggttggacctttggtgcaggtgctgcattacaaataccatttgctatgcaaatggcttataggtttaatggtattggagttacacagaatgttctctatgagaaccaaaaattgattgccaaccaatttaatagtgctattggcaaaattcaagactcactttcttccacagcaagtgcacttggaaaacttcaagatgtggtcaaccaaaatgcacaagctttaaacacgcttgttaaacaacttagctccaattttggtgcaatttcaagtgttttaaatgatatcctttcacgtcttgaccctcccgaggctgaagtgcaaattgataggttgatcacaggcagacttcaaagtttgcagacatatgtgactcaacaattaattagagctgcagaaatcagagcttctgctaatcttgctgctactaaaatgtcagagtgtgtacttggacaatcaaaaagagttgatttttgtggaaagggctatcatcttatgtccttccctcagtcagcacctcatggtgtagtcttcttgcatgtgacttatgtccctgcacaagaaaagaacttcacaactgctcctgccatttgtcatgatggaaaagcacactttcctcgtgaaggtgtctttgtttcaaatggcacacactggtttgtaacacaaaggaatttttatgaaccacaaatcattactacagacaacacatttgtgtctggtaactgtgatgttgtaataggaattgtcaacaacacagtttatgatcctttgcaacctgaattagactcattcaaggaggagttagataaatattttaagaatcatacatcaccagatgttgatttaggtgacatctctggcattaatgcttcagttgtaaacattcaaaaagaaattgaccgcctcaatgaggttgccaagaatttaaatgaatctctcatcgatctccaagaacttggaaagtatgagcagtatataaaatggccatggtacatttggctaggttttatagctggcttgattgccatagtaatggtgacaattatgctttgctgtatgaccagttgctgtagttgtctcaagggctgttgttcttgtggatcctgctgcaaatttgatgaagacgactctgagccagtgctcaaaggagtcaaattacattacaca

SEQ ID NO: 119 - RNA, 798 nt, synthetic construct
  source 1..798: mol_type = other RNA
atgtttgtttttcttgttttattgccactagtctctagtcagtgtagagtccaaccaacagaatctattgttagatttcctaatattacaaacttgtgcccttttggtgaagtttttaacgccaccagatttgcatccgtgtatgcttggaacaggaagagaatcagcaactgtgttgctgattattctgtcctatataattccgcatcattttccacttttaagtgttatggagtgtctcctactaaattaaatgatctctgctttactaatgtctatgcagattcatttgtaattagaggtgatgaagtcagacaaatcgctccagggcaaactggaaagattgctgattataattataaattaccagatgattttacaggctgcgttatagcttggaattctaacaatcttgattctaaggttggtggtaattataattacctgtatagattgtttaggaagtctaatctcaaaccttttgagagagatatttcaactgaaatctatcaggccggtagcacaccttgtaatggtgttgaaggttttaattgttactttcctttacaatcatatggtttccaacccactaatggtgttggttaccaaccatacagagtagtagtactttcttttgaacttctacatgcaccagcaactgtttgtggacctaaaaagtctactaatttggttaaaaacaaatgtgtcaatttcgggtatatccctgaagcccccagggacggccaggcttacgtcagaaaggatggagagtgggtgctcttgagcaccttcctgtaa

SEQ ID NO: 120 - RNA, 3819 nt, synthetic construct
  source 1..3819: mol_type = other RNA
atgtttgtttttcttgttttattgccactagtctctagtcagtgtgttaatcttacaaccagaactcaattaccccctgcatacactaattctttcacacgtggtgtttattaccctgacaaagttttcagatcctcagttttacattcaactcaggatttgttcttacctttcttttccaatgttacttggttccatgctatacatgtctctgggaccaatggtactaagaggtttgataaccctgtcctaccatttaatgatggtgtttattttgcttccactgagaagtctaacataataagaggctggatctttggtactactttagattcgaagacccagtccctacttattgttaataacgctactaatgttgttattaaagtctgtgaatttcaattttgtaatgatccatttttgggtgtttattaccacaaaaacaacaaaagttggatggaaagtgagttcagagtttattctagtgcgaataattgcacttttgaatatgtctctcagccttttcttatggaccttgaaggaaaacagggtaatttcaaaaatcttagggaatttgtgtttaagaatattgatggttattttaaaatatattctaagcacacgcctattaatttagtgcgtgatctccctcagggtttttcggctttagaaccattggtagatttgccaataggtattaacatcactaggtttcaaactttacttgctttacatagaagttatttgactcctggtgattcttcttcaggttggacagctggtgctgcagcttattatgtgggttatcttcaacctaggacttttctattaaaatataatgaaaatggaaccattacagatgctgtagactgtgcacttgaccctctctcagaaacaaagtgtacgttgaaatccttcactgtagaaaaaggaatctatcaaacttctaactttagagtccaaccaacagaatctattgttagatttcctaatattacaaacttgtgcccttttggtgaagtttttaacgccaccagatttgcatccgtgtatgcttggaacaggaagagaatcagcaactgtgttgctgattattctgtcctatataattccgcatcattttccacttttaagtgttatggagtgtctcctactaaattaaatgatctctgctttactaatgtctatgcagattcatttgtaattagaggtgatgaagtcagacaaatcgctccagggcaaactggaaagattgctgattataattataaattaccagatgattttacaggctgcgttatagcttggaattctaacaatcttgattctaaggttggtggtaattataattacctgtatagattgtttaggaagtctaatctcaaaccttttgagagagatatttcaactgaaatctatcaggccggtagcacaccttgtaatggtgttgaaggttttaattgttactttcctttacaatcatatggtttccaacccactaatggtgttggttaccaaccatacagagtagtagtactttcttttgaacttctacatgcaccagcaactgtttgtggacctaaaaagtctactaatttggttaaaaacaaatgtgtcaatttcaacttcaatggtttaacaggcacaggtgttcttactgagtctaacaaaaagtttctgcctttccaacaatttggcagagacattgctgacactactgatgctgtccgtgatccacagacacttgagattcttgacattacaccatgttcttttggtggtgtcagtgttataacaccaggaacaaatacttctaaccaggttgctgttctttatcaggatgttaactgcacagaagtccctgttgctattcatgcagatcaacttactcctacttggcgtgtttattctacaggttctaatgtttttcaaacacgtgcaggctgtttaataggggctgaacatgtcaacaactcatatgagtgtgacatacccattggtgcaggtatatgcgctagttatcagactcagactaattctcctcggcgggcacgtagtgtagctagtcaatccatcattgcctacactatgtcacttggtgcagaaaattcagttgcttactctaataactctattgccatacccacaaattttactattagtgttaccacagaaattctaccagtgtctatgaccaagacatcagtagattgtacaatgtacatttgtggtgattcaactgaatgcagcaatcttttgttgcaatatggcagtttttgtacacaattaaaccgtgctttaactgggatagctgttgaacaagacaaaaacacccaagaagtttttgcacaagtcaaacaaatttacaaaacaccaccaattaaagattttggtggttttaatttttcacaaatattaccagatccatcaaaaccaagcaagaggtcatttattgaagatctacttttcaacaaagtgacacttgcagatgctggcttcatcaaacaatatggtgattgccttggtgatattgctgctagggacctcatttgtgcacaaaagtttaacggccttactgttttgccacctttgctcacagatgaaatgattgctcaatacacttctgcactgttagcgggtacaatcacttctggttggacctttggtgcaggtgctgcattacaaataccatttgctatgcaaatggcttataggtttaatggtattggagttacacagaatgttctctatgagaaccaaaaattgattgccaaccaatttaatagtgccattggcaaaattcaagactcactttcttccacagcaagtgcacttggaaaacttcaagatgtggtcaaccaaaatgcacaagctttaaacacgcttgttaaacaacttagctccaattttggtgcaatttcaagtgttttaaatgatatcctttcacgtcttgaccctcccgaggctgaagtgcaaattgataggttgatcacaggcagacttcaaagtttgcagacatatgtgactcaacaattaattagagctgcagaaatcagagcttctgctaatcttgctgctactaaaatgtcagagtgtgtacttggacaatcaaaaagagttgatttttgtggaaagggctatcatcttatgtccttccctcagtcagcacctcatggtgtagtcttcttgcatgtgacttatgtccctgcacaagaaaagaacttcacaactgctcctgccatttgtcatgatggaaaagcacactttcctcgtgaaggtgtctttgtttcaaatggcacacactggtttgtaacacaaaggaatttttatgaaccacaaatcattactacagacaacacatttgtgtctggtaactgtgatgttgtaataggaattgtcaacaacacagtttatgatcctttgcaacctgaattagactcattcaaggaggagttagataaatattttaagaatcatacatcaccagatgttgatttaggtgacatctctggcattaatgcttcagttgtaaacattcaaaaagaaattgaccgcctcaatgaggttgccaagaatttaaatgaatctctcatcgatctccaagaacttggaaagtatgagcagtatataaaatggccatggtacatttggctaggttttatagctggcttgattgccatagtaatggtgacaattatgctttgctgtatgaccagttgctgtagttgtctcaagggctgttgttcttgtggatcctgctgcaaatttgatgaagacgactctgagccagtgctcaaaggagtcaaattacattacaca

SEQ ID NO: 121 - RNA, 3819 nt, synthetic construct
  source 1..3819: mol_type = other RNA
atgtttgtttttcttgttttattgccactagtctctagtcagtgtgttaatcttacaaccagaactcaattaccccctgcatacactaattctttcacacgtggtgtttattaccctgacaaagttttcagatcctcagttttacattcaactcaggatttgttcttacctttcttttccaatgttacttggttccatgctatacatgtctctgggaccaatggtactaagaggtttgataaccctgtcctaccatttaatgatggtgtttattttgcttccactgagaagtctaacataataagaggctggatctttggtactactttagattcgaagacccagtccctacttattgttaataacgctactaatgttgttattaaagtctgtgaatttcaattttgtaatgatccatttttgggtgtttattaccacaaaaacaacaaaagttggatggaaagtgagttcagagtttattctagtgcgaataattgcacttttgaatatgtctctcagccttttcttatggaccttgaaggaaaacagggtaatttcaaaaatcttagggaatttgtgtttaagaatattgatggttattttaaaatatattctaagcacacgcctattaatttagtgcgtgatctccctcagggtttttcggctttagaaccattggtagatttgccaataggtattaacatcactaggtttcaaactttacttgctttacatagaagttatttgactcctggtgattcttcttcaggttggacagctggtgctgcagcttattatgtgggttatcttcaacctaggacttttctattaaaatataatgaaaatggaaccattacagatgctgtagactgtgcacttgaccctctctcagaaacaaagtgtacgttgaaatccttcactgtagaaaaaggaatctatcaaacttctaactttagagtccaaccaacagaatctattgttagatttcctaatattacaaacttgtgcccttttggtgaagtttttaacgccaccagatttgcatccgtgtatgcttggaacaggaagagaatcagcaactgtgttgctgattattctgtcctatataattccgcatcattttccacttttaagtgttatggagtgtctcctactaaattaaatgatctctgctttactaatgtctatgcagattcatttgtaattagaggtgatgaagtcagacaaatcgctccagggcaaactggaaagattgctgattataattataaattaccagatgattttacaggctgcgttatagcttggaattctaacaatcttgattctaaggttggtggtaattataattacctgtatagattgtttaggaagtctaatctcaaaccttttgagagagatatttcaactgaaatctatcaggccggtagcacaccttgtaatggtgttgaaggttttaattgttactttcctttacaatcatatggtttccaacccactaatggtgttggttaccaaccatacagagtagtagtactttcttttgaacttctacatgcaccagcaactgtttgtggacctaaaaagtctactaatttggttaaaaacaaatgtgtcaatttcaacttcaatggtttaacaggcacaggtgttcttactgagtctaacaaaaagtttctgcctttccaacaatttggcagagacattgctgacactactgatgctgtccgtgatccacagacacttgagattcttgacattacaccatgttcttttggtggtgtcagtgttataacaccaggaacaaatacttctaaccaggttgctgttctttatcagggtgttaactgcacagaagtccctgttgctattcatgcagatcaacttactcctacttggcgtgtttattctacaggttctaatgtttttcaaacacgtgcaggctgtttaataggggctgaacatgtcaacaactcatatgagtgtgacatacccattggtgcaggtatatgcgctagttatcagactcagactaattctcctcggcgggcacgtagtgtagctagtcaatccatcattgcctacactatgtcacttggtgcagaaaattcagttgcttactctaataactctattgccatacccacaaattttactattagtgttaccacagaaattctaccagtgtctatgaccaagacatcagtagattgtacaatgtacatttgtggtgattcaactgaatgcagcaatcttttgttgcaatatggcagtttttgtacacaattaaaccgtgctttaactgggatagctgttgaacaagacaaaaacacccaagaagtttttgcacaagtcaaacaaatttacaaaacaccaccaattaaagattttggtggttttaatttttcacaaatattaccagatccatcaaaaccaagcaagaggtcatttattgaagatctacttttcaacaaagtgacacttgcagatgctggcttcatcaaacaatatggtgattgccttggtgatattgctgctagggacctcatttgtgcacaaaagtttaacggccttactgttttgccacctttgctcacagatgaaatgattgctcaatacacttctgcactgttagcgggtacaatcacttctggttggacctttggtgcaggtgctgcattacaaataccatttgctatgcaaatggcttataggtttaatggtattggagttacacagaatgttctctatgagaaccaaaaattgattgccaaccaatttaatagtgccattggcaaaattcaagactcactttcttccacagcaagtgcacttggaaaacttcaagatgtggtcaaccaaaatgcacaagctttaaacacgcttgttaaacaacttagctccaattttggtgcaatttcaagtgttttaaatgatatcctttcacgtcttgaccctcccgaggctgaagtgcaaattgataggttgatcacaggcagacttcaaagtttgcagacatatgtgactcaacaattaattagagctgcagaaatcagagcttctgctaatcttgctgctactaaaatgtcagagtgtgtacttggacaatcaaaaagagttgatttttgtggaaagggctatcatcttatgtccttccctcagtcagcacctcatggtgtagtcttcttgcatgtgacttatgtccctgcacaagaaaagaacttcacaactgctcctgccatttgtcatgatggaaaagcacactttcctcgtgaaggtgtctttgtttcaaatggcacacactggtttgtaacacaaaggaatttttatgaaccacaaatcattactacagacaacacatttgtgtctggtaactgtgatgttgtaataggaattgtcaacaacacagtttatgatcctttgcaacctgaattagactcattcaaggaggagttagataaatattttaagaatcatacatcaccagatgttgatttaggtgacatctctggcattaatgcttcagttgtaaacattcaaaaagaaattgaccgcctcaatgaggttgccaagaatttaaatgaatctctcatcgatctccaagaacttggaaagtatgagcagtatataaaatggccatggtacatttggctaggttttatagctggcttgattgccatagtaatggtgacaattatgctttgctgtatgaccagttgctgtagttgtctcaagggctgttgttcttgtggatcctgctgcaaatttgatgaagacgactctgagccagtgctcaaaggagtcaaattacattacaca

SEQ ID NO: 122 - RNA, 3819 nt, synthetic construct; identical to SEQ ID NO: 120
  source 1..3819: mol_type = other RNA

SEQ ID NO: 123 - RNA, 756 nt, synthetic construct; identical to SEQ ID NO: 112
  source 1..756: mol_type = other RNA

SEQ ID NO: 124 - RNA, 732 nt, synthetic construct; identical to SEQ ID NO: 113
  source 1..732: mol_type = other RNA

SEQ ID NO: 125 - RNA, 3819 nt, synthetic construct
  source 1..3819: mol_type = other RNA
atgttcgtgttcctggtgctgctccccctggtgagctcccagtgcgtcaactttaccaaccggacccagctgcccagtgcctataccaacagcttcacccgcggcgtctactaccccgacaaggtgttccggagcagcgtgctgcacagcacccaggacctcttcctccccttttttagcaacgtgacctggttccacgccatccacgtgagtggcaccaacggcaccaagcggttcgacaaccctgtgctccccttcaacgacggcgtgtacttcgctagcacagaaaaaagtaacatcattcggggctggatcttcggcaccacactcgacagtaagacccagagcctgctgattgtgaataacgccaccaacgtggtgatcaaggtgtgcgagttccagttctgcaactaccccttcctgggcgtgtactaccacaagaacaacaagagctggatggagagcgagttccgcgtgtatagctctgccaacaactgcacctttgagtacgtgagccagcccttcctgatggacctggagggcaagcagggcaatttcaaaaacctcagcgagttcgtgttcaagaacatcgacggctacttcaagatctacagcaagcacacccccatcaacctggtgcgggacctgccccagggctttagcgctctggagcccctggtggacctgcccatcggcatcaacatcacccgcttccaaaccctgttggccctgcaccggagctacctgacccctggcgatagcagtagtggctggacagccggagccgccgcctactacgtgggatacctgcagccccggaccttcctgctgaagtacaacgagaacggcacaatcacagacgctgtggactgcgccctggaccccctgagcgaaacaaagtgcaccctcaaaagtttcaccgtggagaagggcatctaccagaccagcaacttccgggtgcagcccaccgagagcatcgtgcggttccccaacatcaccaacctgtgccccttcggcgaggtgttcaacgccacccggttcgccagcgtgtacgcctggaaccggaagcggatcagcaactgcgtggccgactacagcgtgctgtataacagtgccagcttcagcaccttcaagtgctacggcgtgagccccaccaagctgaacgacctgtgcttcaccaacgtgtacgccgatagctttgtgatccggggcgacgaggtgcggcagatcgcccccggccagacaggcacaattgccgattacaattacaagctgcccgacgatttcaccggctgcgtgatcgcctggaacagcaacaacctggacagcaaggtgggcggaaactacaactacctgtaccggctgttccgcaaaagtaacctcaagcctttcgagcgggacatcagcaccgagatctaccaggccggcagtaccccttgcaacggcgtgaagggcttcaactgctacttccccctgcagagctacggcttccagcccacctacggcgtgggctaccagccctaccgggtggtggttctgagcttcgagctgctgcacgcccctgccaccgtgtgcggccccaagaaaagcaccaacctggtgaagaacaagtgcgtgaacttcaactttaacggactgacaggcaccggcgtgctgaccgagagcaacaagaagttcctgcccttccagcaattcggccgggatattgccgacaccaccgacgccgtgcgggacccccagaccctggagatcctggacatcacaccctgtagcttcggcggcgtgagcgtgatcacccccggcaccaacaccagcaaccaggtggccgtgctctaccaaggcgtgaactgcaccgaggtgcccgtggccatccacgccgaccagctgacccccacctggcgggtgtacagcaccggcagcaacgtgttccagacccgggccggctgcctgatcggcgccgagtacgtgaataacagctacgagtgcgacatccccatcggagccggaatctgcgccagctaccagacccagaccaacagcccccggagagcccggagcgtggccagccagagcattattgcctacaccatgagcctgggcgccgagaacagcgtggcctacagcaacaatagtattgccatccccaccaacttcaccatcagcgtgaccactgaaatcctccccgtgagcatgaccaagaccagcgtggactgcaccatgtacatctgcggcgacagcaccgagtgcagcaacctgctcctgcagtacggcagcttctgcacccagctgaaccgggccctgaccggaattgccgtggagcaggacaagaacacccaggaggtgttcgcccaggtgaagcagatctacaagacacctcctatcaaggacttcggcgggttcaacttcagccagatcctgcccgaccccagcaagcccagcaagcggagcttcatcgaggacctgttgttcaacaaggtgaccctggccgacgccggcttcatcaagcagtacggcgactgtctgggagatattgccgcacgggacctgatctgcgcccagaagttcaacggcctgaccgtgctgcctcctctgctgaccgacgagatgatcgcccagtacacaagcgctctgctcgccggcaccatcaccagcggctggaccttcggcgccggcgctgccctgcagatccccttcgccatgcagatggcctaccggttcaacggcatcggcgtgacccagaacgtgctgtacgagaaccagaagctgatcgccaaccagttcaacagcgccatcggcaagatccaggacagcctgagctccaccgccagcgccctgggcaagctgcaggacgtggtgaaccagaacgcccaggccctgaacaccctggtgaagcagctgagcagcaacttcggcgccatcagctctgtgctgaacgacatcctgagccggctggaccccccagaggccgaggtgcaaatcgatcggctcatcaccggccggctgcagagcctgcagacctacgtgacacagcagctgatccgggccgccgagatccgggccagcgccaacctggccgctatcaagatgagcgagtgcgtgctgggccagagcaagcgggtggacttctgcggcaagggctaccacctgatgagcttcccccagagcgccccccacggcgtggtgttcctgcacgtgacctacgtgcccgcccaggagaagaacttcaccaccgcccccgccatctgccacgacggcaaggcccacttcccccgggagggcgtgttcgtgagcaacggcacccactggttcgtgacccagcggaacttctacgagccccagatcataaccaccgacaacaccttcgtgagcggcaactgcgacgtggtcatcggcatcgtgaacaacaccgtgtacgaccccctgcagcccgagctggacagcttcaaggaggaactggacaagtacttcaagaaccacaccagccccgacgtggacctgggcgacatcagcggcatcaacgccagcttcgtgaacatccagaaggagatcgaccggctgaacgaggtggccaagaacctgaacgagagcctgatcgacctgcaggagctgggcaagtacgagcagtacatcaagtggccctggtacatctggctgggctttattgccggcctgatcgccatcgtgatggtgaccatcatgctgtgctgtatgacaagctgttgcagttgcctgaagggctgctgcagctgcggcagctgctgcaagttcgacgaggacgacagcgagcccgtgctgaagggcgtgaagctgcactacacc

SEQ ID NO: 126 - RNA, 3819 nt, synthetic construct
  source 1..3819: mol_type = other RNA
atgttcgtgttcctggtgctgctccccctggtgagctcccagtgcgtcaacctgaccacacggacccagctgccccccgcctataccaacagcttcacccgcggcgtctactaccccgacaaggtgttccggagcagcgtgctgcacagcacccaggacctcttcctccccttttttagcaacgtgacctggttccacgccatccacgtgagtggcaccaacggcaccaagcggttcgccaaccctgtgctccccttcaacgacggcgtgtacttcgctagcacagaaaaaagtaacatcattcggggctggatcttcggcaccacactggatagcaaaacccagagcctgctgattgtgaataacgccaccaacgtggtgatcaaggtgtgcgagttccagttctgcaacgaccccttcctgggcgtgtactaccacaagaacaacaagagctggatggagagcgagttccgcgtgtatagctctgccaacaactgcaccttcgagtacgtgagccagcccttcctgatggacctggagggcaagcagggcaatttcaaaaacctgcgggagttcgtgttcaagaacatcgacggctacttcaagatctacagcaagcacacccccatcaacctggtgcggggcctgccccagggctttagcgctctggagcccctggtggacctgcccatcggcatcaacatcacccgcttccaaaccctgttggccctgcaccggagctacctgacccctggcgatagcagtagtggctggacagccggagccgccgcctactacgtgggatacctgcagccccggaccttcctgctgaagtacaacgagaacggcacaatcacagacgccgtggactgcgccctggaccccctgagcgaaacaaagtgcaccctcaaaagtttcaccgtggagaagggcatctaccagaccagcaacttccgggtgcagcccaccgagagcatcgtgcggttccccaacatcaccaacctgtgccccttcggcgaggtgttcaacgccacccggttcgccagcgtgtacgcctggaaccggaagcggatcagcaactgcgtggccgactacagcgtgctgtataacagtgccagcttcagcaccttcaagtgctacggcgtgagccccaccaagctgaacgacctgtgcttcaccaacgtgtacgccgacagcttcgtgatccggggcgacgaggtgcggcagatcgcccccggccagaccggcaatattgctgactataactataagctgcccgacgatttcaccggctgcgtgatcgcctggaacagcaacaacctggacagcaaggtgggcggaaactacaactacctgtaccggctgttccgcaaaagtaacctcaagcctttcgagcgggacatcagcaccgagatctaccaggccggcagtaccccttgcaacggcgtgaagggcttcaactgctacttccccctgcagagctacggcttccagcccacctacggcgtgggctaccagccctaccgggtggtggttctgagcttcgagctgctgcacgcccctgccaccgtgtgcggccccaagaaaagcaccaacctggtgaagaacaagtgcgtgaacttcaactttaacggactgacaggcaccggcgtgctgaccgagagcaacaagaagttcctgcccttccagcaattcggccgggatattgccgacaccactgacgccgtgcgggacccccagaccctggagatcctggacatcacaccctgtagcttcggcggcgtgagcgtgatcacccccggcaccaacaccagcaaccaggtggccgtgctctaccaaggcgtgaactgcaccgaggtgcccgtggccatccacgccgaccagctgacccccacctggcgggtgtacagcaccggcagcaacgtgttccagacccgggccggctgcctgatcggcgccgagcacgtgaataacagctacgagtgcgacatccccatcggagccggaatctgcgccagctaccagacccagaccaacagcccccggagagcccggagcgtggccagccagagcattattgcctacaccatgagcctgggcgtggagaacagcgtggcctacagcaacaatagtattgccatccccaccaacttcaccatcagcgtgaccaccgaaatcctccccgtgagcatgaccaagaccagcgtggactgcaccatgtacatctgcggcgacagcaccgagtgcagcaacctgctcctgcagtacggcagcttctgcacccagctgaaccgggccctgaccggaattgccgtggagcaggacaagaacacccaggaggtgttcgcccaggtgaagcagatctacaagacacctcccatcaaggacttcggcgggttcaacttcagccagatcctgcccgaccccagcaagcccagcaagcggagcttcatcgaggacctgttgttcaacaaggtgaccctggccgacgccggcttcatcaagcagtacggcgactgtctgggagatattgccgcacgggacctgatctgcgcccagaagttcaacggcctgaccgtgctgcccccactgctgaccgacgagatgatcgcccagtacacaagcgctctgctcgccggcaccatcaccagcggctggaccttcggcgccggcgctgccctgcagatccccttcgccatgcagatggcctaccggttcaacggcatcggcgtgacccagaacgtgctgtacgagaaccagaagctgatcgccaaccagttcaacagcgccatcggcaagatccaggacagcctgagctccaccgccagcgccctgggcaagctgcaggacgtggtgaaccagaacgcccaggccctgaacaccctggtgaagcagctgagcagcaacttcggcgccatcagctctgtgctgaacgacatcctgagccggctggatcctcctgaggccgaggtgcaaatcgatcggctcatcaccggccggctgcagagcctgcagacctacgtgacacagcagctgatccgggccgccgagatccgggccagcgccaacctggccgctaccaagatgagcgagtgcgtgctgggccagagcaagcgggtggacttctgcggcaagggctaccacctgatgagcttcccccagagcgccccccacggcgtggtgttcctgcacgtgacctacgtgcccgcccaggagaagaacttcaccaccgcccccgccatctgccacgacggcaaggcccacttcccccgggagggcgtgttcgtgagcaacggcacccactggttcgtgacccagcggaacttctacgagccccagatcataaccacagacaacaccttcgtgagcggcaactgcgacgtggtcatcggcatcgtgaacaacaccgtgtacgaccccctgcagcccgagctggacagcttcaaggaggaactggacaagtacttcaagaaccacaccagccccgacgtggacctgggcgacatcagcggcatcaacgccagcgtggtgaacatccagaaggagatcgaccggctgaacgaggtggccaagaacctgaacgagagcctgatcgacctgcaggagctgggcaagtacgagcagtacatcaagtggccctggtacatctggctgggctttattgccggcctgatcgccatcgtgatggtgaccatcatgctgtgctgtatgacaagctgttgcagttgcctgaagggctgctgcagctgcggcagctgctgcaagttcgacgaggacgacagcgagcccgtgctgaagggcgtgaagctgcactacacc

SEQ ID NO: 127 - RNA, 3810 nt, synthetic construct
  source 1..3810: mol_type = other RNA
atgttcgtgttcctggtgctgctccccctggtgagctcccagtgcgtcaacctgaccacacggacccagctgccccccgcctataccaacagcttcacccggggcgtgtactatcccgacaaggtgttccggagcagcgtgctgcacagcacccaggacctcttcctccccttttttagcaacgtgacctggttccacgctatcagtggcaccaacggcaccaagcggttcgacaaccctgtgctccccttcaacgacggcgtgtacttcgctagcacagaaaaaagtaacatcattcggggctggatcttcggcaccacactggatagcaaaacccagagcctgctgattgtgaataacgccaccaacgtggtgatcaaggtgtgcgagttccagttctgcaacgaccccttcctgggcgtgtaccacaagaacaacaagagctggatggagagcgagttccgcgtgtatagctctgccaacaactgcaccttcgagtacgtgagccagcccttcctgatggacctggagggcaagcagggcaatttcaaaaacctgcgggagttcgtgttcaagaacatcgacggctacttcaagatctacagcaagcacacccccatcaacctggtgcgggacctgccccagggctttagcgctctggagcccctggtggacctgcccatcggcatcaacatcacccgcttccaaaccctgttggccctgcaccggagctacctgacccctggcgatagcagtagtggctggacagccggagccgccgcctactacgtgggatacctgcagccccggaccttcctgctgaagtacaacgagaacggcacaatcacagacgccgtggactgcgccctggaccccctgagcgaaacaaagtgcaccctcaaaagtttcaccgtggagaagggcatctaccagaccagcaacttccgggtgcagcccaccgagagcatcgtgcggttccccaacatcaccaacctgtgccccttcggcgaggtgttcaacgccacccggttcgccagcgtgtacgcctggaaccggaagcggatcagcaactgcgtggccgactacagcgtgctgtataacagtgccagcttcagcaccttcaagtgctacggcgtgagccccaccaagctgaacgacctgtgcttcaccaacgtgtacgccgacagcttcgtgatccggggcgacgaggtgcggcagatcgcccccggccagaccggcaagatcgccgattacaattacaagctgcccgacgatttcaccggctgcgtgatcgcctggaacagcaacaacctggacagcaaggtgggcggaaactacaactacctgtaccggctgttccgcaaaagtaacctgaagcccttcgagcgggacatcagcaccgagatctaccaggccggcagtaccccttgcaacggcgtggagggcttcaactgctacttccccctgcagagctacggcttccagcccacctacggcgtgggctaccagccctaccgggtggtggttctgagcttcgagctgctgcacgcccctgccaccgtgtgcggccccaagaaaagcaccaacctggtgaagaacaagtgcgtgaacttcaactttaacggactgacaggcaccggcgtgctgaccgagagcaacaagaagttcctgcccttccagcaattcggccgggacatcgacgacaccactgacgccgtgcgggacccccagaccctggagatcctggacatcacaccctgtagcttcggcggcgtgagcgtgatcacccccggcaccaacaccagcaaccaggtggccgtgctctaccaaggcgtgaactgcaccgaggtgcccgtggccatccacgccgaccagctgacccccacctggcgggtgtacagcaccggcagcaacgtgttccagacccgggccggctgcctgatcggcgccgagcacgtgaataacagctacgagtgcgacatccccatcggagccggaatctgcgccagctaccagacccagaccaacagccaccggagagcccggagcgtggccagccagagcattattgcctacaccatgagcctgggcgccgagaacagcgtggcctacagcaacaatagtattgccatccccaccaacttcaccatcagcgtgaccaccgaaatcctccccgtgagcatgaccaagaccagcgtggactgcaccatgtacatctgcggcgacagcaccgagtgcagcaacctgctcctgcagtacggcagcttctgcatccagctgaaccgggccctgaccggaattgccgtggagcaggacaagaacacccaggaggtgttcgcccaggtgaagcagatctacaagacacctcccatcaaggacttcggcgggttcaacttcagccagatcctgcccgaccccagcaagcccagcaagcggagcttcatcgaggacctgttgttcaacaaggtgaccctggccgacgccggcttcatcaagcagtacggcgactgtctgggagatattgccgcacgggacctgatctgcgcccagaagttcaacggcctgaccgtgctgcccccactgctgaccgacgagatgatcgcccagtacacaagcgctctgctcgccggcaccatcaccagcggctggaccttcggcgccggcgctgccctgcagatccccttcgccatgcagatggcctaccggttcaacggcatcggcgtgacccagaacgtgctgtacgagaaccagaagctgatcgccaaccagttcaacagcgccatcggcaagatccaggacagcctgagctccaccgccagcgccctgggcaagctgcaggacgtggtgaaccagaacgcccaggccctgaacaccctggtgaagcagctgagcagcaacttcggcgccatcagctctgtgctgaacgacatcctggcccggctggatcctcctgaggccgaggtgcaaatcgatcggctcatcaccggccggctgcagagcctgcagacctacgtgacacagcagctgatccgggccgccgagatccgggccagcgccaacctggccgctaccaagatgagcgagtgcgtgctgggccagagcaagcgggtggacttctgcggcaagggctaccacctgatgagcttcccccagagcgccccccacggcgtggtgttcctgcacgtgacctacgtgcccgcccaggagaagaacttcaccaccgcccccgccatctgccacgacggcaaggcccacttcccccgggagggcgtgttcgtgagcaacggcacccactggttcgtgacccagcggaacttctacgagccccagatcataaccacacacaacaccttcgtgagcggcaactgcgacgtggtcatcggcatcgtgaacaacaccgtgtacgaccccctgcagcccgagctggacagcttcaaggaggaactggacaagtacttcaagaaccacaccagccccgacgtggacctgggcgacatcagcggcatcaacgccagcgtggtgaacatccagaaggagatcgaccggctgaacgaggtggccaagaacctgaacgagagcctgatcgacctgcaggagctgggcaagtacgagcagtacatcaagtggccctggtacatctggctgggctttattgccggcctgatcgccatcgtgatggtgaccatcatgctgtgctgtatgacaagctgttgcagttgcctgaagggctgctgcagctgcggcagctgctgcaagttcgacgaggacgacagcgagcccgtgctgaagggcgtgaagctgcactacacc

SEQ ID NO: 128 - RNA, 723 nt, synthetic construct
  source 1..723: mol_type = other RNA
atgggcgtcaaggtcctgttcgccctgatctgtattgccgtggccgaggccaagcgggtgcagcccaccgagagcatcgtgcggttccccaacatcaccaacctgtgccccttcggcgaggtgttcaacgccacccggttcgccagcgtgtacgcctggaaccggaagcggatcagcaactgcgtggccgactacagcgtgctgtacaacagcgccagcttcagcaccttcaagtgctacggcgtgagccccaccaagctgaacgacctgtgcttcaccaacgtgtacgccgacagcttcgtgatccggggcgacgaggtgcggcagatcgcccccggccagacaggcaacattgctgattacaattacaagctgcccgacgatttcaccggctgcgtgatcgcctggaacagcaacaatctggacagcaaggtgggcggaaactacaactacctgtaccggctgttccgcaaaagtaacctcaagcctttcgagcgggacatcagcaccgagatctaccaggccggcagcaccccctgcaacggcgtgaagggcttcaactgctacttccccctgcagagctacggcttccagcccacctacggcgtgggctaccagccctaccgggtggtcgtgctgagcttcgagctgctccacgcccccgccaccgtgtgcggccccaagaaaagcaccaacctggtgaagaacaagtgcgtgaacttc

SEQ ID NO: 129 - RNA, 3810 nt, synthetic construct
  source 1..3810: mol_type = other RNA
atgttcgtgttcctggtgctgctccccctggtgagctcccagtgcgtcaactttaccacccggacccagctgccccccgcctataccaacagcttcacccgcggcgtctactaccccgacaaggtgttccggagcagcgtgctgcacagcacccaggacctcttcctccccttttttagcaacgtgacctggttccacgccatccacgtgagtggcaccaacggcaccaagcggttcgccaaccctgtgctccccttcaacgacggcgtgtacttcgctagcacagaaaaaagtaacatcattcggggctggatcttcggcaccacactggatagcaaaacccagagcctgctgattgtgaataacgccaccaacgtggtgatcaaggtgtgcgagttccagttctgcaacgaccccttcctgggcgtgtactaccacaagaacaacaagagctggatggagagcgagttccgcgtgtatagctctgccaacaactgcaccttcgagtacgtgagccagcccttcctgatggacctggagggcaagcagggcaatttcaaaaacctgcgggagttcgtgttcaagaacatcgacggctacttcaagatctacagcaagcacacccccatcaacctggtgcggggcctgccccagggctttagcgctctggagcccctggtggacctgcccatcggcatcaacatcacccgcttccaaaccctgcacatcagctacctgacccctggcgatagcagtagtggctggacagccggagccgccgcctactacgtgggatacctgcagccccggaccttcctgttgaagtacaacgagaacggcacaatcacagacgccgtggactgcgccctggaccccctgagcgaaacaaagtgcaccctcaaaagtttcaccgtggagaagggcatctaccagaccagcaacttccgggtgcagcccaccgagagcatcgtgcggttccccaacatcaccaacctgtgccccttcggcgaggtgttcaacgccacccggttcgccagcgtgtacgcctggaaccggaagcggatcagcaactgcgtggccgactacagcgtgctgtataacagtgccagcttcagcaccttcaagtgctacggcgtgagccccaccaagctgaacgacctgtgcttcaccaacgtgtacgccgacagcttcgtgatccggggcgacgaggtgcggcagatcgcccccggccagaccggcaatattgctgactataactataagctgcccgacgatttcaccggctgcgtgatcgcctggaacagcaacaacctggacagcaaggtgggcggaaactacaactacctgtaccggctgttccgcaaaagtaacctcaagcctttcgagcgggacatcagcaccgagatctaccaggccggcagtaccccttgcaacggcgtgaagggcttcaactgctacttccccctgcagagctacggcttccagcccacctacggcgtgggctaccagccctaccgggtggtggttctgagcttcgagctgctgcacgcccctgccaccgtgtgcggccccaagaaaagcaccaacctggtgaagaacaagtgcgtgaacttcaactttaacggactgacaggcaccggcgtgctgaccgagagcaacaagaagttcctgcccttccagcaattcggccgggatattgccgacaccactgacgccgtgcgggacccccagaccctggagatcctggacatcacaccctgtagcttcggcggcgtgagcgtgatcacccccggcaccaacaccagcaaccaggtggccgtgctctaccaaggcgtgaactgcaccgaggtgcccgtggccatccacgccgaccagctgacccccacctggcgggtgtacagcaccggcagcaacgtgttccagacccgggccggctgcctgatcggcgccgagcacgtgaataacagctacgagtgcgacatccccatcggagccggaatctgcgccagctaccagacccagaccaacagcccccggagagcccggagcgtggccagccagagcattattgcctacaccatgagcctgggcgtggagaacagcgtggcctacagcaacaatagtattgccatccccaccaacttcaccatcagcgtgaccaccgaaatcctccccgtgagcatgaccaagaccagcgtggactgcaccatgtacatctgcggcgacagcaccgagtgcagcaacctgctgctccagtacggcagcttctgcacccagctgaaccgggccctgaccggaattgccgtggagcaggacaagaacacccaggaggtgttcgcccaggtgaagcagatctacaagacacctcccatcaaggacttcggcgggttcaacttcagccagatcctgcccgaccccagcaagcccagcaagcggagcttcatcgaggacctgctgttcaacaaggtgaccctggccgacgccggcttcatcaagcagtacggcgactgtctgggagatattgccgcacgggacctgatctgcgcccagaagttcaacggcctgaccgtgctgcccccactgttgaccgacgagatgatcgcccagtacacaagcgctctgctggccggcaccatcaccagcggctggaccttcggcgccggcgctgccctgcagatccccttcgccatgcagatggcctaccggttcaacggcatcggcgtgacccagaacgtgctgtacgagaaccagaagctgatcgccaaccagttcaacagcgccatcggcaagatccaggacagcctgagctccaccgccagcgccctgggcaagctgcaggacgtggtgaaccagaacgcccaggccctgaacaccctggtgaagcagctgagcagcaacttcggcgccatcagctctgtgctgaacgacatcctgagccggctggatcctcctgaggccgaggtgcaaatcgatcggctcatcaccggccggctgcagagcctgcagacctacgtgacacagcagctgatccgggccgccgagatccgggccagcgccaacctggccgctaccaagatgagcgagtgcgtgctgggccagagcaagcgggtggacttctgcggcaagggctaccacctgatgagcttcccccagagcgccccccacggcgtggtgttcctgcacgtgacctacgtgcccgcccaggagaagaacttcaccaccgcccccgccatctgccacgacggcaaggcccacttcccccgggagggcgtgttcgtgagcaacggcacccactggttcgtgacccagcggaacttctacgagccccagatcataaccacagacaacaccttcgtgagcggcaactgcgacgtggtcatcggcatcgtgaacaacaccgtgtacgaccccctgcagcccgagctggacagcttcaaggaggaactggacaagtacttcaagaaccacaccagccccgacgtggacctgggcgacatcagcggcatcaacgccagcgtggtgaacatccagaaggagatcgaccggctgaacgaggtggccaagaacctgaacgagagcctgatcgacctgcaggagctgggcaagtacgagcagtacatcaagtggccctggtacatctggctgggctttattgccggcctgatcgccatcgtgatggtgaccatcatgctgtgctgtatgacaagctgttgcagttgcctgaagggctgctgcagctgcggcagctgctgcaagttcgacgaggacgacagcgagcccgtgctgaagggcgtgaagctgcactacacc

SEQ ID NO: 130 - RNA, 3819 nt, synthetic construct
  source 1..3819: mol_type = other RNA
atgttcgtgttcctggtgctgctgcctctggtgtccagccagtgtgtgaacctgaccaccagaacacagctgcctccagcctacaccaacagctttaccagaggcgtgtactaccccgacaaggtgttcagatccagcgtgctgcactctacccaggacctgttcctgcctttcttcagcaacgtgacctggttccacgccatccacgtgtccggcaccaatggcaccaagagattcgacaaccccgtgctgcccttcaacgacggggtgtactttgccagcaccgagaagtccaacatcatcagaggctggatcttcggcaccacactggacagcaagacccagagcctgctgatcgtgaacaacgccaccaacgtggtcatcaaagtgtgcgagttccagttctgcaacgaccccttcctgggcgtctactaccacaagaacaacaagagctggatggaaagcgagttccgggtgtacagcagcgccaacaactgcaccttcgagtacgtgtcccagcctttcctgatggacctggaaggcaagcagggcaacttcaagaacctgcgcgagttcgtgtttaagaacatcgacggctacttcaagatctacagcaagcacacccctatcaacctcgtgcgggatctgcctcagggcttctctgctctggaacccctggtggatctgcccatcggcatcaacatcacccggtttcagacactgctggccctgcacagaagctacctgacacctggcgatagcagcagcggatggacagctggtgccgccgcttactatgtgggctacctgcagcctagaaccttcctgctgaagtacaacgagaacggcaccatcaccgacgccgtggattgtgctctggatcctctgagcgagacaaagtgcaccctgaagtccttcaccgtggaaaagggcatctaccagaccagcaacttccgggtgcagcccaccgaatccatcgtgcggttccccaatatcaccaatctgtgccccttcggcgaggtgttcaatgccaccagattcgcctctgtgtacgcctggaaccggaagcggatcagcaattgcgtggccgactactccgtgctgtacaactccgccagcttcagcaccttcaagtgctacggcgtgtcccctaccaagctgaacgacctgtgcttcacaaacgtgtacgccgacagcttcgtgatccggggagatgaagtgcggcagattgcccctggacagacaggcaagatcgccgactacaactacaagctgcccgacgacttcaccggctgtgtgattgcctggaacagcaacaacctggactccaaagtcggcggcaactacaattacctgtaccggctgttccggaagtccaatctgaagcccttcgagcgggacatctccaccgagatctatcaggccggcagcaccccttgtaacggcgtggaaggcttcaactgctacttcccactgcagtcctacggctttcagcccacaaatggcgtgggctatcagccctacagagtggtggtgctgagcttcgaactgctgcatgcccctgccacagtgtgcggccctaagaaaagcaccaatctcgtgaagaacaaatgcgtgaacttcaacttcaacggcctgaccggcaccggcgtgctgacagagagcaacaagaagttcctgccattccagcagtttggccgggatatcgccgataccacagacgccgttagagatccccagacactggaaatcctggacatcaccccttgcagcttcggcggagtgtctgtgatcacccctggcaccaacaccagcaatcaggtggcagtgctgtaccaggacgtgaactgtaccgaagtgcccgtggccattcacgccgatcagctgacacctacatggcgggtgtactccaccggcagcaatgtgtttcagaccagagccggctgtctgatcggagccgagcacgtgaacaatagctacgagtgcgacatccccatcggcgctggaatctgcgccagctaccagacacagacaaacagccctcggagagccagaagcgtggccagccagagcatcattgcctacacaatgtctctgggcgccgagaacagcgtggcctactccaacaactctatcgctatccccaccaacttcaccatcagcgtgaccacagagatcctgcctgtgtccatgaccaagaccagcgtggactgcaccatgtacatctgcggcgattccaccgagtgctccaacctgctgctgcagtacggcagcttctgcacccagctgaatagagccctgacagggatcgccgtggaacaggacaagaacacccaagaggtgttcgcccaagtgaagcagatctacaagacccctcctatcaaggacttcggcggcttcaatttcagccagattctgcccgatcctagcaagcccagcaagcggagcttcatcgaggacctgctgttcaacaaagtgacactggccgacgccggcttcatcaagcagtatggcgattgtctgggcgacattgccgccagggatctgatttgcgcccagaagtttaacggactgacagtgctgcctcctctgctgaccgatgagatgatcgcccagtacacatctgccctgctggccggcacaatcacaagcggctggacatttggagcaggcgccgctctgcagatcccctttgctatgcagatggcctaccggttcaacggcatcggagtgacccagaatgtgctgtacgagaaccagaagctgatcgccaaccagttcaacagcgccatcggcaagatccaggacagcctgagcagcacagcaagcgccctgggaaagctgcaggacgtggtcaaccagaatgcccaggcactgaacaccctggtcaagcagctgtcctccaacttcggcgccatcagctctgtgctgaacgatatcctgagcagactggaccctcctgaggccgaggtgcagatcgacagactgatcacaggcagactgcagagcctccagacatacgtgacccagcagctgatcagagccgccgagattagagcctctgccaatctggccgccaccaagatgtctgagtgtgtgctgggccagagcaagagagtggacttttgcggcaagggctaccacctgatgagcttccctcagtctgcccctcacggcgtggtgtttctgcacgtgacatatgtgcccgctcaagagaagaatttcaccaccgctccagccatctgccacgacggcaaagcccactttcctagagaaggcgtgttcgtgtccaacggcacccattggttcgtgacacagcggaacttctacgagccccagatcatcaccaccgacaacaccttcgtgtctggcaactgcgacgtcgtgatcggcattgtgaacaataccgtgtacgaccctctgcagcccgagctggacagcttcaaagaggaactggacaagtactttaagaaccacacaagccccgacgtggacctgggcgatatcagcggaatcaatgccagcgtcgtgaacatccagaaagagatcgaccggctgaacgaggtggccaagaatctgaacgagagcctgatcgacctgcaagaactggggaagtacgagcagtacatcaagtggccctggtacatctggctgggctttatcgccggactgattgccatcgtgatggtcacaatcatgctgtgttgcatgaccagctgctgtagctgcctgaagggctgttgtagctgtggcagctgctgcaagttcgacgaggacgattctgagcccgtgctgaagggcgtgaaactgcactacaca

SEQ ID NO: 131 - RNA, 3819 nt, synthetic construct; identical to SEQ ID NO: 120
  source 1..3819: mol_type = other RNA

SEQ ID NO: 132 - RNA, 3819 nt, synthetic construct
  source 1..3819: mol_type = other RNA
atgttcgtgttcctggtgctgctgcctctggtgtccagccagtgtgtgaacctgaccaccagaacacagctgcctccagcctacaccaacagctttaccagaggcgtgtactaccccgacaaggtgttcagatccagcgtgctgcactctacccaggacctgttcctgcctttcttcagcaacgtgacctggttccacgccatccacgtgtccggcaccaacggcaccaagagattcgacaaccccgtgctgcccttcaacgacggggtgtactttgccagcaccgagaagtccaacatcatcagaggctggatcttcggcaccacactggacagcaagacccagagcctgctgatcgtgaacaacgccaccaacgtggtcatcaaagtgtgcgagttccagttctgcaacgaccccttcctgggcgtctactaccacaagaacaacaagagctggatggaaagcgagttccgggtgtacagcagcgccaacaactgcaccttcgagtacgtgtcccagcctttcctgatggacctggaaggcaagcagggcaacttcaagaacctgcgcgagttcgtgtttaagaacatcgacggctacttcaagatctacagcaagcacacccctatcaacctcgtgcgggatctgcctcagggcttctctgctctggaacccctggtggatctgcccatcggcatcaacatcacccggtttcagacactgctggccctgcacagaagctacctgacacctggcgatagcagcagcggctggacagctggtgccgccgcttactacgtgggctacctgcagcctagaaccttcctgctgaagtacaacgagaacggcaccatcaccgacgccgtggattgtgctctggatcctctgagcgagacaaagtgcaccctgaagtccttcaccgtggaaaagggcatctaccagaccagcaacttccgggtgcagcccaccgaatccatcgtgcggttccccaatatcaccaatctgtgccccttcggcgaggtgttcaacgccaccagattcgcctctgtgtacgcctggaaccggaagcggatcagcaattgcgtggccgactactccgtgctgtacaactccgccagcttcagcaccttcaagtgctacggcgtgtcccctaccaagctgaacgacctgtgcttcacaaacgtgtacgccgacagcttcgtgatccggggagacgaagtgcggcagattgcccctggacagacaggcaagatcgccgactacaactacaagctgcccgacgacttcaccggctgtgtgattgcctggaacagcaacaacctggactccaaagtcggcggcaactacaattacctgtaccggctgttccggaagtccaatctgaagcccttcgagcgggacatctccaccgagatctatcaggccggcagcaccccttgtaacggcgtggaaggcttcaactgctacttcccactgcagtcctacggctttcagcccacaaacggcgtgggctatcagccctacagagtggtggtgctgagcttcgaactgctgcacgcccctgccacagtgtgcggccctaagaaaagcaccaatctcgtgaagaacaagtgcgtgaacttcaacttcaacggcctgaccggcaccggcgtgctgacagagagcaacaagaagttcctgccattccagcagtttggccgggatatcgccgataccacagacgccgttagagatccccagacactggaaatcctggacatcaccccttgcagcttcggcggagtgtctgtgatcacccctggcaccaacaccagcaatcaggtggcagtgctgtaccaggacgtgaactgtaccgaagtgcccgtggccattcacgccgatcagctgacacctacctggcgggtgtactccaccggcagcaacgtgtttcagaccagagccggctgtctgatcggagccgagcacgtgaacaatagctacgagtgcgacatccccatcggcgctggaatctgcgccagctaccagacacagacaaacagccctcggagagccagaagcgtggccagccagagcatcattgcctacacaatgtctctgggcgccgagaacagcgtggcctactccaacaactctatcgctatccccaccaacttcaccatcagcgtgaccacagagatcctgcctgtgtccatgaccaagaccagcgtggactgcaccatgtacatctgcggcgattccaccgagtgctccaacctgctgctgcagtacggcagcttctgcacccagctgaatagagccctgacagggatcgccgtggaacaggacaagaacacccaagaggtgttcgcccaagtgaagcagatctacaagacccctcctatcaaggacttcggcggcttcaatttcagccagattctgcccgatcctagcaagcccagcaagcggagcttcatcgaggacctgctgttcaacaaagtgacactggccgacgccggcttcatcaagcagtacggcgattgtctgggcgacattgccgccagggatctgatttgcgcccagaagtttaacggactgacagtgctgcctcctctgctgaccgacgagatgatcgcccagtacacatctgccctgctggccggcacaatcacaagcggctggacatttggagcaggcgccgctctgcagatcccctttgctatgcagatggcctaccggttcaacggcatcggagtgacccagaacgtgctgtacgagaaccagaagctgatcgccaaccagttcaacagcgccatcggcaagatccaggacagcctgagcagcacagcaagcgccctgggaaagctgcaggacgtggtcaaccagaacgcccaggcactgaacaccctggtcaagcagctgtcctccaacttcggcgccatcagctctgtgctgaacgatatcctgagcagactggaccctcctgaggccgaggtgcagatcgacagactgatcacaggcagactgcagagcctccagacatacgtgacccagcagctgatcagagccgccgagattagagcctctgccaatctggccgccaccaagatgtctgagtgtgtgctgggccagagcaagagagtggacttttgcggcaagggctaccacctgatgagcttccctcagtctgcccctcacggcgtggtgtttctgcacgtgacatacgtgcccgctcaagagaagaatttcaccaccgctccagccatctgccacgacggcaaagcccactttcctagagaaggcgtgttcgtgtccaacggcacccattggttcgtgacacagcggaacttctacgagccccagatcatcaccaccgacaacaccttcgtgtctggcaactgcgacgtcgtgatcggcattgtgaacaataccgtgtacgaccctctgcagcccgagctggacagcttcaaagaggaactggacaagtactttaagaaccacacaagccccgacgtggacctgggcgatatcagcggaatcaacgccagcgtcgtgaacatccagaaagagatcgaccggctgaacgaggtggccaagaatctgaacgagagcctgatcgacctgcaagaactggggaagtacgagcagtacatcaagtggccctggtacatctggctgggctttatcgccggactgattgccatcgtgatggtcacaatcatgctgtgttgcatgaccagctgctgtagctgcctgaagggctgttgtagctgtggcagctgctgcaagttcgacgaggacgattctgagcccgtgctgaagggcgtgaaactgcactacaca

SEQ ID NO: 133 - RNA, 1533 nt, synthetic construct
  source 1..1533: mol_type = other RNA
atgggagtcaaagttctgtttgccctgatctgcattgctgtggccgaggccaagagagtccaaccaacagaatctattgttagatttcctaatattacaaacttgtgcccttttggtgaagtttttaacgccaccagatttgcatccgtgtatgcttggaacaggaagagaatcagcaactgtgttgctgattattctgtcctatataattccgcatcattttccacttttaagtgttatggagtgtctcctactaaattaaatgatctctgctttactaatgtctatgcagattcatttgtaattagaggtgatgaagtcagacaaatcgctccagggcaaactggaaagattgctgattataattataaattaccagatgattttacaggctgcgttatagcttggaattctaacaatcttgattctaaggttggtggtaattataattacctgtatagattgtttaggaagtctaatctcaaaccttttgagagagatatttcaactgaaatctatcaggccggtagcacaccttgtaatggtgttgaaggttttaattgttactttcctttacaatcatatggtttccaacccactaatggtgttggttaccaaccatacagagtagtagtactttcttttgaacttctacatgcaccagcaactgtttgtggacctaaaaagtctactaatttggttaaaaacaaatgtgtcaatttcggaagcggcaggctgagacgaggcagcggcgccaccaacttcagcctgttgaagcaggccggcgacgtggaggaaaaccccggccccatgggagtcaaagttctgtttgccctgatctgcattgctgtggccgaggccaagagagtccaaccaacagaatctattgttagatttcctaatattacaaacttgtgcccttttggtgaagtttttaacgccaccagatttgcatccgtgtatgcttggaacaggaagagaatcagcaactgtgttgctgattattctgtcctatataattccgcatcattttccacttttaagtgttatggagtgtctcctactaaattaaatgatctctgctttactaatgtctatgcagattcatttgtaattagaggtgatgaagtcagacaaatcgctccagggcaaactggaaagattgctgattataattataaattaccagatgattttacaggctgcgttatagcttggaattctaacaatcttgattctaaggttggtggtaattataattacctgtatagattgtttaggaagtctaatctcaaaccttttgagagagatatttcaactgaaatctatcaggccggtagcacaccttgtaatggtgttgaaggttttaattgttactttcctttacaatcatatggtttccaacccactaatggtgttggttaccaaccatacagagtagtagtactttcttttgaacttctacatgcaccagcaactgtttgtggacctaaaaagtctactaatttggttaaaaacaaatgtgtcaatttc

SEQ ID NO: 134 - RNA, 2343 nt, synthetic construct
  source 1..2343: mol_type = other RNA
atgggagtcaaagttctgtttgccctgatctgcattgctgtggccgaggccaagagagtccaaccaacagaatctattgttagatttcctaatattacaaacttgtgcccttttggtgaagtttttaacgccaccagatttgcatccgtgtatgcttggaacaggaagagaatcagcaactgtgttgctgattattctgtcctatataattccgcatcattttccacttttaagtgttatggagtgtctcctactaaattaaatgatctctgctttactaatgtctatgcagattcatttgtaattagaggtgatgaagtcagacaaatcgctccagggcaaactggaaagattgctgattataattataaattaccagatgattttacaggctgcgttatagcttggaattctaacaatcttgattctaaggttggtggtaattataattacctgtatagattgtttaggaagtctaatctcaaaccttttgagagagatatttcaactgaaatctatcaggccggtagcacaccttgtaatggtgttgaaggttttaattgttactttcctttacaatcatatggtttccaacccactaatggtgttggttaccaaccatacagagtagtagtactttcttttgaacttctacatgcaccagcaactgtttgtggacctaaaaagtctactaatttggttaaaaacaaatgtgtcaatttcggaagcggcaggctgagacgaggcagcggcgccaccaacttcagcctgttgaagcaggccggcgacgtggaggaaaaccccggccccatgggagtcaaagttctgtttgccctgatctgcattgctgtggccgaggccaagagagtccaaccaacagaatctattgttagatttcctaatattacaaacttgtgcccttttggtgaagtttttaacgccaccagatttgcatccgtgtatgcttggaacaggaagagaatcagcaactgtgttgctgattattctgtcctatataattccgcatcattttccacttttaagtgttatggagtgtctcctactaaattaaatgatctctgctttactaatgtctatgcagattcatttgtaattagaggtgatgaagtcagacaaatcgctccagggcaaactggaaagattgctgattataattataaattaccagatgattttacaggctgcgttatagcttggaattctaacaatcttgattctaaggttggtggtaattataattacctgtatagattgtttaggaagtctaatctcaaaccttttgagagagatatttcaactgaaatctatcaggccggtagcacaccttgtaatggtgttgaaggttttaattgttactttcctttacaatcatatggtttccaacccactaatggtgttggttaccaaccatacagagtagtagtactttcttttgaacttctacatgcaccagcaactgtttgtggacctaaaaagtctactaatttggttaaaaacaaatgtgtcaatttcggaagcggcaggctgagacgaggcagcggcgccaccaacttcagcctgttgaagcaggccggcgacgtggaggaaaaccccggccccatgggagtcaaagttctgtttgccctgatctgcattgctgtggccgaggccaagagagtccaaccaacagaatctattgttagatttcctaatattacaaacttgtgcccttttggtgaagtttttaacgccaccagatttgcatccgtgtatgcttggaacaggaagagaatcagcaactgtgttgctgattattctgtcctatataattccgcatcattttccacttttaagtgttatggagtgtctcctactaaattaaatgatctctgctttactaatgtctatgcagattcatttgtaattagaggtgatgaagtcagacaaatcgctccagggcaaactggaaagattgctgattataattataaattaccagatgattttacaggctgcgttatagcttggaattctaacaatcttgattctaaggttggtggtaattataattacctgtatagattgtttaggaagtctaatctcaaaccttttgagagagatatttcaactgaaatctatcaggccggtagcacaccttgtaatggtgttgaaggttttaattgttactttcctttacaatcatatggtttccaacccactaatggtgttggttaccaaccatacagagtagtagtactttcttttgaacttctacatgcaccagcaactgtttgtggacctaaaaagtctactaatttggttaaaaacaaatgtgtcaatttc

SEQ ID NO: 135 - RNA, 1479 nt, synthetic construct
  source 1..1479: mol_type = other RNA
atgggagtcaaagttctgtttgccctgatctgcattgctgtggccgaggccaagagagtccaaccaacagaatctattgttagatttcctaatattacaaacttgtgcccttttggtgaagtttttaacgccaccagatttgcatccgtgtatgcttggaacaggaagagaatcagcaactgtgttgctgattattctgtcctatataattccgcatcattttccacttttaagtgttatggagtgtctcctactaaattaaatgatctctgctttactaatgtctatgcagattcatttgtaattagaggtgatgaagtcagacaaatcgctccagggcaaactggaaagattgctgattataattataaattaccagatgattttacaggctgcgttatagcttggaattctaacaatcttgattctaaggttggtggtaattataattacctgtatagattgtttaggaagtctaatctcaaaccttttgagagagatatttcaactgaaatctatcaggccggtagcacaccttgtaatggtgttgaaggttttaattgttactttcctttacaatcatatggtttccaacccactaatggtgttggttaccaaccatacagagtagtagtactttcttttgaacttctacatgcaccagcaactgtttgtggacctaaaaagtctactaatttggttaaaaacaaatgtgtcaatttcggaagcggcaggctgagacgaggcagcggcgccaccaacttcagcctgttgaagcaggccggcgacgtggaggaaaaccccggccccagagtccaaccaacagaatctattgttagatttcctaatattacaaacttgtgcccttttggtgaagtttttaacgccaccagatttgcatccgtgtatgcttggaacaggaagagaatcagcaactgtgttgctgattattctgtcctatataattccgcatcattttccacttttaagtgttatggagtgtctcctactaaattaaatgatctctgctttactaatgtctatgcagattcatttgtaattagaggtgatgaagtcagacaaatcgctccagggcaaactggaaagattgctgattataattataaattaccagatgattttacaggctgcgttatagcttggaattctaacaatcttgattctaaggttggtggtaattataattacctgtatagattgtttaggaagtctaatctcaaaccttttgagagagatatttcaactgaaatctatcaggccggtagcacaccttgtaatggtgttgaaggttttaattgttactttcctttacaatcatatggtttccaacccactaatggtgttggttaccaaccatacagagtagtagtactttcttttgaacttctacatgcaccagcaactgtttgtggacctaaaaagtctactaatttggttaaaaacaaatgtgtcaatttc

SEQ ID NO: 136 - RNA, 2235 nt, synthetic construct
  source 1..2235: mol_type = other RNA
atgggagtcaaagttctgtttgccctgatctgcattgctgtggccgaggccaagagagtccaaccaacagaatctattgttagatttcctaatattacaaacttgtgcccttttggtgaagtttttaacgccaccagatttgcatccgtgtatgcttggaacaggaagagaatcagcaactgtgttgctgattattctgtcctatataattccgcatcattttccacttttaagtgttatggagtgtctcctactaaattaaatgatctctgctttactaatgtctatgcagattcatttgtaattagaggtgatgaagtcagacaaatcgctccagggcaaactggaaagattgctgattataattataaattaccagatgattttacaggctgcgttatagcttggaattctaacaatcttgattctaaggttggtggtaattataattacctgtatagattgtttaggaagtctaatctcaaaccttttgagagagatatttcaactgaaatctatcaggccggtagcacaccttgtaatggtgttgaaggttttaattgttactttcctttacaatcatatggtttccaacccactaatggtgttggttaccaaccatacagagtagtagtactttcttttgaacttctacatgcaccagcaactgtttgtggacctaaaaagtctactaatttggttaaaaacaaatgtgtcaatttcggaagcggcaggctgagacgaggcagcggcgccaccaacttcagcctgttgaagcaggccggcgacgtggaggaaaaccccggccccagagtccaaccaacagaatctattgttagatttcctaatattacaaacttgtgcccttttggtgaagtttttaacgccaccagatttgcatccgtgtatgcttggaacaggaagagaatcagcaactgtgttgctgattattctgtcctatataattccgcatcattttccacttttaagtgttatggagtgtctcctactaaattaaatgatctctgctttactaatgtctatgcagattcatttgtaattagaggtgatgaagtcagacaaatcgctccagggcaaactggaaagattgctgattataattataaattaccagatgattttacaggctgcgttatagcttggaattctaacaatcttgattctaaggttggtggtaattataattacctgtatagattgtttaggaagtctaatctcaaaccttttgagagagatatttcaactgaaatctatcaggccggtagcacaccttgtaatggtgttgaaggttttaattgttactttcctttacaatcatatggtttccaacccactaatggtgttggttaccaaccatacagagtagtagtactttcttttgaacttctacatgcaccagcaactgtttgtggacctaaaaagtctactaatttggttaaaaacaaatgtgtcaatttcggaagcggcaggctgagacgaggcagcggcgccaccaacttcagcctgttgaagcaggccggcgacgtggaggaaaaccccggccccagagtccaaccaacagaatctattgttagatttcctaatattacaaacttgtgcccttttggtgaagtttttaacgccaccagatttgcatccgtgtatgcttggaacaggaagagaatcagcaactgtgttgctgattattctgtcctatataattccgcatcattttccacttttaagtgttatggagtgtctcctactaaattaaatgatctctgctttactaatgtctatgcagattcatttgtaattagaggtgatgaagtcagacaaatcgctccagggcaaactggaaagattgctgattataattataaattaccagatgattttacaggctgcgttatagcttggaattctaacaatcttgattctaaggttggtggtaattataattacctgtatagattgtttaggaagtctaatctcaaaccttttgagagagatatttcaactgaaatctatcaggccggtagcacaccttgtaatggtgttgaaggttttaattgttactttcctttacaatcatatggtttccaacccactaatggtgttggttaccaaccatacagagtagtagtactttcttttgaacttctacatgcaccagcaactgtttgtggacctaaaaagtctactaatttggttaaaaacaaatgtgtcaatttc

SEQ ID NO: 137 - RNA, 981 nt, synthetic construct
  source 1..981: mol_type = other RNA
atgggagtcaaagttctgtttgccctgatctgcattgctgtggccgaggccaagagagtccaaccaacagaatctattgttagatttcctaatattacaaacttgtgcccttttggtgaagtttttaacgccaccagatttgcatccgtgtatgcttggaacaggaagagaatcagcaactgtgttgctgattattctgtcctatataattccgcatcattttccacttttaagtgttatggagtgtctcctactaaattaaatgatctctgctttactaatgtctatgcagattcatttgtaattagaggtgatgaagtcagacaaatcgctccagggcaaactggaaagattgctgattataattataaattaccagatgattttacaggctgcgttatagcttggaattctaacaatcttgattctaaggttggtggtaattataattacctgtatagattgtttaggaagtctaatctcaaaccttttgagagagatatttcaactgaaatctatcaggccggtagcacaccttgtaatggtgttgaaggttttaattgttactttcctttacaatcatatggtttccaacccactaatggtgttggttaccaaccatacagagtagtagtactttcttttgaacttctacatgcaccagcaactgtttgtggacctaaaaagtctactaatttggttaaaaacaaatgtgtcaatttcggaagcggcaggctgagacgaggcagcggcgccaccaacttcagcctgttgaagcaggccggcgacgtggaggaaaaccccggccccggcctcgaacaactcgaaagcattatcaattttgaaaaactcacagaatggaccagtggactcgagcaactcgagagtatcattaatttcgaaaagctcacagagtggacaagcggcctggagcagctggagagcatcataaacttcgagaagctgaccgagtggaccagc

SEQ ID NO: 138 - RNA, 1530 nt, synthetic construct
  source 1..1530: mol_type = other RNA
atgggagtcaaagttctgtttgccctgatctgcattgctgtggccgaggccaagagagtccaaccaacagaatctattgttagatttcctaatattacaaacttgtgcccttttggtgaagtttttaacgccaccagatttgcatccgtgtatgcttggaacaggaagagaatcagcaactgtgttgctgattattctgtcctatataattccgcatcattttccacttttaagtgttatggagtgtctcctactaaattaaatgatctctgctttactaatgtctatgcagattcatttgtaattagaggtgatgaagtcagacaaatcgctccagggcaaactggaaagattgctgattataattataaattaccagatgattttacaggctgcgttatagcttggaattctaacaatcttgattctaaggttggtggtaattataattacctgtatagattgtttaggaagtctaatctcaaaccttttgagagagatatttcaactgaaatctatcaggccggtagcacaccttgtaatggtgttgaaggttttaattgttactttcctttacaatcatatggtttccaacccactaatggtgttggttaccaaccatacagagtagtagtactttcttttgaacttctacatgcaccagcaactgtttgtggacctaaaaagtctactaatttggttaaaaacaaatgtgtcaatttccggcggaagcggagaagcggcagcggcgccaccaacttcagcctgttgaagcaggccggcgacgtggaggaaaaccccggccccatgggagtcaaagttctgtttgccctgatctgcattgctgtggccgaggccaagagagtccaaccaacagaatctattgttagatttcctaatattacaaacttgtgcccttttggtgaagtttttaacgccaccagatttgcatccgtgtatgcttggaacaggaagagaatcagcaactgtgttgctgattattctgtcctatataattccgcatcattttccacttttaagtgttatggagtgtctcctactaaattaaatgatctctgctttactaatgtctatgcagattcatttgtaattagaggtgatgaagtcagacaaatcgctccagggcaaactggaaagattgctgattataattataaattaccagatgattttacaggctgcgttatagcttggaattctaacaatcttgattctaaggttggtggtaattataattacctgtatagattgtttaggaagtctaatctcaaaccttttgagagagatatttcaactgaaatctatcaggccggtagcacaccttgtaatggtgttgaaggttttaattgttactttcctttacaatcatatggtttccaacccactaatggtgttggttaccaaccatacagagtagtagtactttcttttgaacttctacatgcaccagcaactgtttgtggacctaaaaagtctactaatttggttaaaaacaaatgtgtcaatttc

SEQ ID NO: 139 - RNA, 3844 nt, synthetic construct
  source 1..3844: mol_type = other RNA
ataggtctcacatgtttgttttcttagttttattacctttagtttcttcccagtgtgttaatttaactactagaactcaattacctcctgcttatactaattcttttactagaggagtgtattatcctgataaggtttttagatcttctgttctgcactctactcaggatttgttcttgcccttcttctctaacgtgacctggttccacgctattcacgtttctggaaccaacggcactaagagatttgataatcccgttttgccttttaacgacggagtttatttcgcctctaccgaaaaatctaacatcattaggggctggatctttggaactaccctggattctaaaactcaatctttattgattgtgaataacgctaccaacgttgtgattaaagtttgtgaatttcaattttgtaacgatccttttctgggagtttattatcataaaaacaataaatcttggatggaatctgaattccgcgtttattcttctgccaataactgtacctttgagtacgtttctcaacctttcttaatggatttagaaggaaaacaaggcaatttcaaaaacttaagagaatttgtttttaaaaatattgacggatattttaaaatttattctaagcatactcctattaatttagtgagagacttaccccaaggattttctgctttagaacctttagttgacttacctattggaatcaatatcactagatttcaaactttattagctttacatagatcttatttaactcctggagattcttcctccggctggacagccggagccgctgcttattacgttggatatttacagcctagaacttttctgctgaaatataacgaaaacggaaccattaccgacgccgttgactgtgctctggatcctttatctgaaaccaagtgtactttaaaatcttttaccgttgaaaaaggaatttatcaaacttctaattttagagttcaacctactgaatctatcgttagattccctaatattactaatttgtgtccctttggagaggttttcaacgctactagatttgcctctgtttacgcttggaatcgcaagagaatttctaattgtgtggccgattactccgttttgtataactctgcttctttctctacttttaagtgttacggagtttcccctactaaactgaacgatttgtgttttactaacgtttacgctgattcttttgttattagaggcgacgaagttagacaaattgctcctggacaaactggaaagattgctgactataactataaactgcctgacgattttaccggctgtgttattgcttggaattctaataatttagattctaaagttggaggaaattataattatttatatagattatttagaaaatctaatttaaaaccttttgaaagagatatttccactgagatttaccaggctggatctactccttgtaacggcgttgagggatttaattgttattttcctttacaatcttacggatttcaacctaccaacggagttggatatcaaccttacagagttgtggtgctgtcttttgaattattacacgctcccgctactgtttgcggccctaaaaagtctactaatctggttaagaataagtgtgtgaattttaatttcaacggattgaccggaactggagttctgactgaatctaataaaaaatttttaccctttcaacaatttggaagggatatcgctgatactactgacgctgttagagatcctcaaactttagaaatcctggatattactccttgttcttttggaggagtttccgttattactcctggcactaatacttctaatcaagttgctgttttatatcaagacgttaattgcaccgaagttcctgttgctattcacgctgatcagttaactcctacttggagagtttattctactggatctaacgtttttcaaaccagagctggctgtttaatcggagctgaacacgtgaataattcttacgagtgcgatattcccatcggagctggaatttgtgcctcttatcaaactcaaaccaattctcctaggagggctagatccgttgcctctcaatctattattgcttataccatgtctttaggagctgaaaattccgttgcttactctaacaattctattgctattcctactaactttactatttctgttactactgaaattctgcccgtgtccatgactaaaacttctgttgattgtactatgtatatttgtggagattccactgagtgttctaacctgttattacaatacggatctttttgtactcaattaaatagagctctgactggaattgctgttgaacaggacaaaaatactcaagaagtttttgcccaagttaaacagatttataaaactcctcctattaaagattttggaggatttaatttctctcaaattttacctgacccttctaagccttccaaaaggtctttcatcgaagatttattatttaataaagttaccttagccgacgctggatttattaagcaatacggagattgcttaggcgatatcgctgctagagacttaatttgtgctcaaaaatttaacggattaactgttttacctcccctgttaactgacgaaatgatcgctcaatatacttctgctctgttagctggaactattacttctggctggacttttggagctggagctgctttacaaattccctttgctatgcagatggcttatagatttaacggaattggagttactcaaaacgttttatacgaaaatcaaaaattaattgctaatcaatttaattctgctattggaaaaattcaagattccctgtcttctactgcttccgctctgggaaaattacaagacgttgttaatcaaaacgctcaagctttgaataccttagttaaacaattatcttccaattttggagctatttcttctgttttaaacgacattttatctagattagatccccctgaagctgaagttcagattgacagattgattaccggaagattacaatctttacaaacttacgttactcaacaactgattagagctgctgaaattagagcctctgctaatttagctgctactaagatgtctgagtgtgttttaggacagtccaaaagagttgatttttgtggaaaaggctatcatctgatgtcttttcctcaatctgctcctcacggagttgtgtttttacacgttacttacgttcctgctcaagagaagaattttactactgctcctgctatttgtcacgacggaaaagctcattttcctagagaaggagtttttgtttctaacggaactcattggtttgttactcaaagaaacttttacgaacctcagattattaccactgataatacctttgtttctggcaattgtgacgtggttattggaattgttaataatactgtttacgatcctttacaacccgaactggattcttttaaagaagaattagataaatactttaaaaatcatacttctcccgacgttgatttaggagatatctctggaattaacgcttctgttgtgaatattcaaaaggaaattgatagattaaacgaagtggctaaaaatttaaacgagtctttaattgatttacaggaactgggaaaatacgaacaatatattaagtggccttggtacatttggttaggctttattgctggactgattgctattgtgatggttactatcatgttgtgttgcatgacttcttgttgttcctgtttaaaaggctgttgctcttgtggatcttgttgcaaatttgacgaagacgattctgaacctgttctgaaaggagttaaactgcattatacttaaatgagaccata

SEQ ID NO: 140 - RNA, 3844 nt, synthetic construct
  source 1..3844: mol_type = other RNA
ataggtctcacatgttcgtgttcttagtgctgttacccctggtttcttctcagtgtgtcaatttaaccaccagaacccaactgcctcctgcctatactaattcctttacccgcggagtttactatcccgataaggtttttcgctcctctgttttacactctactcaggacttattcttacccttcttctccaacgttacttggtttcacgccattcacgtttctggaaccaacggaactaagagattcgataatcctgtgttacctttcaacgacggagtttattttgcttccactgaaaaatccaatatcattaggggctggatctttggaaccactttagattccaagactcaatctttattaattgtgaataacgccaccaacgtggttatcaaagtgtgtgaattccaattttgtaacgaccctttcttaggcgtgtattatcacaaaaataataaatcttggatggaatctgaatttcgcgtttactcttccgctaacaactgcacttttgagtacgtttcccagccttttctgatggatctggaaggcaaacagggaaattttaaaaatctgagagaatttgtttttaagaacattgacggatatttcaagatctattctaaacacactcccatcaatttggttagagatttacctcagggcttttctgctttagaacctttagttgacctgcctattggaatcaacattactagatttcaaactctgttagctctgcatagatcttatttaactcctggagattcctcctccggctggaccgccggagctgctgcttattacgttggctatttacaacccagaacttttctgttaaaatataacgaaaacggcaccatcactgacgccgtggattgtgctttagatcccttatccgaaactaagtgtactctgaaatccttcactgttgaaaaaggaatttatcagacctctaattttagagtgcaacctaccgaatctattgttagatttcctaatattaccaacttgtgcccttttggcgaagttttcaacgctactagatttgcttctgtttacgcttggaatagaaaaagaatttctaactgtgtggctgactattccgtgttatacaattctgcctctttttctacttttaagtgttacggagtgtctcccactaaactgaacgatttgtgctttaccaacgtttacgctgattcttttgttattagaggcgacgaggttcgccagattgcccctggccagactggcaaaattgctgactataactataaattacctgacgattttaccggctgcgttatcgcttggaactctaataatctggattctaaagttggaggaaactacaattatttatatagattatttagaaaatctaatttaaaacccttcgagagggatatctctactgaaatctaccaagctggatctactccttgcaacggcgttgaaggatttaattgttattttcctttacaatcttacggattccaacctactaacggagttggatatcagccttatagagtggtggttttatctttcgaattattacacgctcccgctactgtgtgtggacccaaaaagtctactaatttagttaaaaataagtgtgttaatttcaattttaacggactcactggcactggagtgttaactgaatctaataaaaagttcttacctttccaacagttcggacgcgacattgccgacaccactgacgctgtgagagatcctcaaaccttagagattctggatattaccccttgttcctttggaggcgtttccgttatcactcccggaactaacacttctaatcaggttgccgttttatatcaggacgttaattgcactgaagttcctgttgctattcacgctgatcaactgactcctacttggagagtttattccactggatctaacgtttttcagactcgcgccggctgtttaattggagctgaacacgtgaacaactcctacgagtgcgatattcctattggcgctggcatctgtgcttcttatcaaactcaaactaattctcccaggagggctcgctctgttgcttcccaatctatcattgcttatactatgtccttaggcgctgaaaattctgttgcttattccaacaattctattgctattcccaccaattttactatttctgtgactactgaaattttacctgtttccatgactaagacttctgttgattgtactatgtatatctgcggagattctactgagtgttccaacctcttattacagtacggatctttttgcactcagttaaatagagctctgactggaatcgctgttgaacaagacaaaaacacccaagaagtgtttgctcaggtgaagcaaatttacaagacacctcctattaaggattttggaggattcaatttttcccagattttacctgatccttctaaaccttctaaacgctcctttattgaagatttactgttcaataaagtgactctggctgacgctggcttcatcaagcaatacggcgattgtttaggagacatcgctgctagagacttaatttgtgctcaaaaattcaacggactgactgttctgccccctttactgaccgacgagatgatcgcccaatatacttctgccctgttagctggcaccattacttctggctggacctttggagctggcgctgctttacaaattcctttcgccatgcagatggcttatcgctttaacggaattggcgttacccaaaacgtgttatacgagaatcaaaaattaatcgccaatcaatttaattctgctattggcaagattcaagattctttatcttctactgcttccgccctgggcaaactgcaggacgttgttaaccagaacgctcaagccctgaacactttagtgaagcaactgtcttctaacttcggcgctatttcttccgttttaaacgacattctgtctcgcttagatccccctgaggctgaggttcaaattgatagactgattactggaagattacagtccctgcaaacttacgttactcaacagttaatcagagctgctgaaatccgcgcttccgctaatttagctgctactaaaatgtctgagtgtgtgttaggccagtctaagagagttgacttttgtggcaagggctatcatttaatgtcttttcctcagtccgctcctcacggcgttgtgttcttacacgtgacttacgttcccgcccaagagaaaaattttaccactgctcctgctatttgtcacgacggaaaagctcattttcctagagaaggagtgtttgtttctaacggaacccactggtttgtgactcaaagaaacttttacgaaccccaaattattactactgacaatactttcgtttccggcaactgtgacgtggtgatcggaattgttaataacaccgtttacgatcccttacaacctgaattagattcttttaaagaagaattagataaatatttcaaaaatcatacttcccctgacgttgatctgggagatatttctggaattaacgcttctgtggtgaacattcaaaaagagattgacagattaaacgaagttgctaaaaacctgaacgagtccctgatcgacctgcaggaactgggaaaatacgagcagtatattaagtggccttggtatatttggttaggatttattgctggattaattgctattgtgatggtgaccattatgttgtgctgtatgacctcttgttgttcttgcctgaagggctgctgttcttgtggctcttgttgcaagtttgacgaagacgattccgaacccgttttaaagggagtgaaactgcattatacttaaatgagaccata

SEQ ID NO: 141 - RNA, 3844 nt, synthetic construct
  source 1..3844: mol_type = other RNA
ataggtctcacatgtttgtttttctggttttattacccttagtgtcctcccagtgcgtgaacttaactacccgcactcagctgcctcctgcctataccaactctttcactagaggcgtttactatcctgacaaagtttttagatcttctgtgctgcattccactcaagatttattcctgcccttcttttctaacgttacttggtttcacgccatccacgtgtctggcaccaacggaaccaaacgctttgacaaccctgtgttaccttttaacgacggagtttacttcgcctccactgaaaagtccaatattatccggggctggattttcggaaccaccttagattctaaaacccagtctctgctgattgtgaacaacgccactaacgtggttattaaagtgtgcgagtttcaattttgcaacgacccttttctgggagtttattaccacaaaaataacaaatcttggatggagtctgaatttagagtgtattcttccgccaataattgcaccttcgagtacgtttcccaaccctttctgatggacttagaaggaaagcaaggcaatttcaaaaacctgcgcgaatttgtgttcaaaaatattgacggctatttcaaaatttactccaagcatacccctattaatttagtgcgcgatctgcctcagggcttctctgccttagagcctttagtggacctgcctattggcattaatattactcgctttcagactttactggccctgcatagatcttatttaactcctggagactcttcttccggctggaccgctggagccgctgcctactacgttggctatctgcagcctagaacttttttattaaagtacaacgaaaacggaaccatcactgacgctgttgattgcgccctggatcctttatctgaaacaaagtgcaccctgaagtccttcaccgttgaaaagggcatttaccaaacatccaattttagggttcagcctactgaatccatcgtgcgctttcccaacatcactaacttgtgtccctttggcgaggtgtttaacgccactcgctttgcctctgtgtacgcctggaacagaaagagaatttccaattgcgtggctgattattctgtgctgtataactccgcttctttctccacctttaagtgttacggagtgtcccctactaaactgaacgacttgtgcttcaccaacgtttacgccgattcttttgtgattcgcggcgacgaagttagacaaatcgcccccggacagaccggaaagatcgctgattacaactataagttacctgacgacttcaccggctgcgtgattgcttggaattctaataacttagactctaaagttggaggcaactacaattacctgtatagattattccgcaaatctaacctgaaaccttttgagagagacatctccaccgaaatttaccaagccggctctaccccctgcaacggagttgaaggatttaattgctactttcccctgcagtcctacggattccaacctactaacggcgttggataccaaccttacagagttgtggtgctgtcttttgaattattacacgcccctgccaccgtttgtggccctaagaaatctaccaatctggttaaaaacaagtgtgtgaattttaattttaacggcctgaccggcactggcgttttaaccgagtctaacaagaagtttctgcctttccaacaatttggcagagacatcgccgacaccaccgacgctgtgcgcgatcctcaaaccttagaaattttagatattactccttgctctttcggcggcgtttccgttattactcctggaaccaatacctctaatcaagtggctgtgctgtaccaggacgttaattgcactgaagtgcctgtggctattcacgccgatcaactgacccccacttggagagtttattctactggatctaacgtgttccaaactagagctggctgtctgatcggcgccgagcacgttaataattcttacgagtgtgatatccctattggcgctggcatttgcgcctcttaccagacccagaccaactccccccgcagagctagatccgtggcctctcagtccattattgcctatactatgtccttaggagccgaaaattctgtggcttactccaacaattctattgccattcccactaattttactatctctgtgactaccgaaatcctgcccgtgtccatgactaagacctccgtggactgcaccatgtatatctgcggagactctactgagtgttccaacttattactgcagtacggctctttctgtactcagctgaatagagccctgactggaattgctgtggagcaagacaaaaatacccaggaggtgttcgctcaggtgaaacaaatttataagacccctcccatcaaagattttggaggcttcaatttttctcaaattctgcccgacccctccaagccttccaaaagatcctttattgaagatctgctgttcaataaggttactttagccgacgccggcttcattaagcagtacggagattgtctgggcgatattgctgcccgcgacctgatttgcgctcagaagttcaacggattaaccgttctgcctcctctgctgactgacgagatgattgctcagtatacttctgccctgctggctggaactattacctctggctggaccttcggcgccggagctgctctgcaaattcccttcgccatgcaaatggcttacagatttaacggcatcggagttactcaaaacgtgctgtacgaaaaccaaaaattaattgccaaccagttcaattccgctatcggcaaaattcaggattctctgtcttctactgcttccgctttaggcaaactgcaagacgttgttaaccagaacgcccaagctttaaacaccctggttaagcagctgtcctctaattttggcgctatctcttctgttctgaacgacattttatctagactggacccccctgaagccgaggtgcagattgatagattaatcaccggaagactgcaatccctgcagacctacgttacccagcaattaatcagagccgccgagatcagagcctctgccaacttagctgccaccaaaatgtccgagtgtgtgctgggacagtccaagcgcgtggacttctgtggaaagggataccacctgatgtcttttcctcaatctgctccccacggagttgtgtttctgcacgttacttacgtgcctgcccaagagaaaaactttactaccgcccccgctatttgccacgacggcaaggctcacttccctagagaaggagtttttgtgtctaacggaacccattggtttgtgactcaaagaaatttttacgagcctcaaatcattaccaccgataacacttttgtttccggcaattgtgacgtggtgattggaatcgttaacaacaccgtttacgaccctttacagcccgaattagactcttttaaagaggagttagataaatattttaaaaaccatacctctcccgacgtggacctgggagatatttccggaattaacgcttctgttgtgaatatccagaaagagatcgacagattaaacgaggttgctaaaaatttaaacgaatccctgattgacctgcaggagctgggcaaatacgaacaatatattaagtggccttggtatatttggttaggcttcatcgctggattaatcgctattgttatggtgactattatgttgtgttgtatgacttcctgctgttcttgcttaaaaggctgctgttcctgcggatcctgttgtaaattcgacgaggacgattccgagcctgttttaaaaggagtgaaattacattatacttaaatgagaccata

SEQ ID NO: 142 - RNA, 3844 nt, synthetic construct
  source 1..3844: mol_type = other RNA
ataggtctcacatgttcgtgttcctggtgctgctgcccttagtgtcctcccagtgtgtgaacctgaccaccagaacccagttacctcccgcttacaccaactcctttacccgcggagtgtactaccctgataaggtttttagatcctccgttctgcattctacccaagacctgtttttacccttcttttccaacgtgacctggttccacgctatccacgtgtccggcactaacggcactaagcgcttcgacaatcctgtgctcccttttaacgacggcgtgtacttcgcttctaccgaaaaatccaacatcatccgcggctggatcttcggaactaccctggattctaaaacccagtctttattaatcgtgaataacgccaccaacgtggttattaaggtctgtgagttccaattttgcaacgaccctttcttaggcgtttattaccacaaaaacaataagtcttggatggagtccgaattccgcgtgtactcctctgccaacaattgcacctttgagtacgtgtcccagcccttcctgatggacctggaaggcaagcagggcaattttaaaaatctgcgcgaattcgttttcaagaacatcgacggctactttaagatttattccaaacatacccccatcaacctggtgcgcgatttaccccagggcttctccgccttagagcccttagtggatctgcctatcggcatcaatatcacccgctttcagactctgctggccctgcacagatcctacctgactcccggagactcttcttctggctggaccgccggagctgccgcctactacgtgggctacctgcaaccccgcacctttctgctgaagtacaacgaaaacggcaccatcacagacgccgttgactgcgctctggaccccctgtctgagactaagtgcaccctgaagtccttcactgtggagaaaggaatctaccagacctccaacttccgcgtgcagcctaccgaatccattgttcgcttccctaacattactaatctgtgccccttcggagaagttttcaacgccactagattcgcttccgtgtacgcctggaatcgcaagcgcatctccaattgcgttgctgactactctgtgttatacaattccgcctctttttccactttcaagtgctacggcgtgtctcctaccaagctgaacgacctgtgtttcactaacgtgtacgctgattcctttgttatccgcggcgacgaggtgagacagatcgcccctggccagaccggaaaaatcgccgactacaactacaagttacccgacgattttaccggctgtgttattgcttggaactctaataatctggactctaaagtgggcggcaattacaactacttatatcgcctgttcagaaaatccaacctgaaacccttcgaacgggacatttccaccgaaatttatcaggccggctccaccccctgcaacggagtggagggcttcaattgctacttccccctgcaatcctacggctttcagcccaccaacggcgtgggataccagccctaccgcgttgttgtgttatcctttgaactgctgcacgctcctgctactgtgtgcggacctaaaaaatccaccaatctggtgaagaacaagtgtgtgaattttaattttaacggcctgaccggcaccggagtgctgaccgagtccaacaaaaagtttctgccctttcagcagttcggccgggacattgccgacactaccgacgctgtgagggatcctcagaccctggagattctggacattaccccttgctccttcggaggagtttccgtgatcacccctggcaccaatacttctaaccaagtggctgttttataccaggacgtgaattgtactgaggtgcctgtggccatccacgccgatcaattaactcccacctggagagtgtattccaccggctctaacgttttccaaacccgcgctggctgcttaatcggcgctgagcacgtgaacaactcctacgagtgtgatattcctatcggagccggcatctgtgcttcctaccagactcagaccaactcccccagacgcgctaggtccgtggcttcccagtctattatcgcttatactatgtccctgggagccgagaattctgttgcctattccaataactccatcgccattcctaccaactttaccatctctgtgaccaccgagattctgcccgtgtccatgaccaaaacttctgtggattgtaccatgtacatctgtggagattccaccgagtgctctaacctgctgctgcagtacggctccttttgcacccaattaaaccgcgctctgactggcatcgccgtggagcaagataaaaacacccaagaggtgttcgctcaggtgaagcagatctacaagacacctcccattaaagatttcggaggctttaatttctctcagatcctgcccgacccttctaagccctctaaacgctccttcatcgaggatctgctgttcaacaaggttaccctggccgacgctggctttatcaaacagtacggcgactgcttaggcgacatcgccgcccgcgatttaatttgcgctcagaagttcaacggactgaccgtgctgcctcctctgctgaccgacgaaatgatcgcccaatacacctccgccctgctggctggcactatcacctccggctggacctttggcgctggagccgctctgcaaatccctttcgctatgcagatggcttaccgctttaacggaatcggcgtgacccagaacgtgttatacgaaaatcagaaattaattgccaatcaatttaactctgccatcggcaagattcaggattctctgtcttctactgcctctgccttaggaaaactgcaggacgtggtgaatcagaacgcccaggccctgaataccctggttaagcaactgtcttccaatttcggcgctatctcctctgtgttaaacgacattctgtcccgcctggatcctcctgaggccgaagtgcaaattgaccgcttaatcactggcagactgcaatccctgcaaacctacgttactcaacagctgatcagagccgccgaaatccgcgcttctgccaacttagctgctaccaagatgtccgagtgcgtgctgggacagtccaaaagagttgacttttgcggaaagggctaccacctgatgtcctttccccagtccgccccccacggagttgttttcctgcacgttacttacgttcctgctcaagagaagaacttcaccaccgctcccgctatttgccacgacggcaaggctcatttccccagagagggagtgtttgtgtccaacggcactcactggtttgttactcagcgcaacttctacgaacctcagatcatcaccactgacaatacctttgtgtccggaaactgtgacgtggttatcggcattgtgaacaatactgtgtacgaccctttacaacctgagctggattcttttaaagaagaactggacaagtacttcaagaaccacacctcccccgacgtggatctgggcgacatctccggcatcaacgcctctgtggtgaatattcagaaggagattgatcgcctgaacgaggttgccaagaatctgaacgagtctctgatcgacctgcaggagctgggcaagtacgaacagtacatcaagtggccctggtacatttggctgggctttattgctggactgatcgctatcgttatggttaccatcatgctgtgctgtatgacctcttgctgctcctgtctgaaaggctgttgctcctgcggctcctgttgtaagtttgacgaggacgactccgagcctgttctgaaaggagttaaactgcactacacctaaatgagaccata

SEQ ID NO: 143 - RNA, 3844 nt, synthetic construct
  source 1..3844: mol_type = other RNA
ataggtctcacatgtttgtgtttctggtgctgctgcctctggtgtcctctcagtgtgttaacctgaccaccagaacccaactgccccccgcctacactaactctttcactcgcggcgtgtactaccccgataaagttttcagatcctccgtgctccattctacccaagacctgttcttaccctttttctccaacgtgacctggttccacgccatccacgtgtccggcactaacggaaccaagcgcttcgataatcccgtgctgcctttcaacgacggagtttactttgcttccaccgagaagtccaatattatccggggctggatcttcggcaccacactggattccaaaacccagtccttactgattgtgaacaacgccactaacgtggtgatcaaggtgtgtgagttccagttctgtaacgacccctttctgggcgtgtattatcataaaaacaacaagtcctggatggagtccgagtttagagtgtattcttccgctaacaactgcaccttcgaatacgtgtcccagcctttcctgatggatctggaaggaaagcagggcaacttcaagaacttacgcgagttcgtgttcaagaacatcgacggctacttcaaaatttactccaagcacacccctatcaacttagtgagagatctgccccagggcttctccgctctggaacctctggtggacttacccattggcatcaacatcactcgcttccaaacactgctcgctctgcaccgctcttatctgacccccggcgactcctcttctggctggaccgccggcgccgctgcctattacgtgggatacctgcaaccccgcacctttctgctgaaatacaacgaaaacggcaccatcacagacgctgtggactgcgctctggaccccctgtccgagactaagtgcaccctgaagtccttcaccgttgaaaagggcatttatcagacttccaacttccgcgtgcagcctactgagtccattgtgcgcttccctaacatcactaacttgtgtcctttcggcgaagtgttcaacgctactcgcttcgcctccgtgtacgcctggaaccgcaagagaatctccaattgcgtggccgactactctgttctctacaactctgcctccttctccacctttaagtgctacggcgtgtcccccaccaaactgaacgacctgtgcttcaccaacgtgtacgccgactcctttgtgatcagaggcgacgaggtgcgccagatcgcccccggccagactggcaagatcgccgattacaattacaagctgcctgacgactttaccggctgcgtgattgcctggaactccaacaacctggactccaaagtgggcggcaactacaactacctgtaccgcctgtttagaaaatccaacctgaagcccttcgagcgggacatttctactgagatctaccaggccggctccaccccctgtaacggcgtggaaggcttcaactgctactttcccctgcagtcctacggcttccagcctaccaacggcgtgggctaccagccctaccgcgtggtggtgttatccttcgagctgctgcacgcccctgccaccgtgtgcggacccaaaaagtctactaacctggttaagaataagtgtgttaatttcaattttaacggcttaaccggaaccggagtgctgaccgagtccaataaaaagttcctgccctttcagcagtttggccgcgacatcgccgatactaccgacgccgtgcgcgatccccagaccctggagatcctggacattaccccctgctctttcggcggagtgtccgtgatcacccccggcaccaatacctccaatcaggtggccgttctgtaccaggacgtgaattgcaccgaagtgcccgtggccattcacgccgaccagttaactcctacttggagagtgtactccaccggctctaacgtgtttcagacccgcgccggctgtctgatcggcgccgagcacgtgaacaactcctacgagtgcgacattcccattggcgccggcatctgcgcctcctaccaaacccagactaactctcccagacgcgcccgctctgtggcctctcagtccatcatcgcttacactatgtccctgggcgccgagaactccgtggcctattccaacaactccatcgccatccccactaacttcaccatctctgtgaccaccgaaatcctccccgtgtctatgactaagacttccgtggactgtaccatgtacatttgcggcgactccaccgagtgttccaatctgctgctgcagtacggctccttttgcacccagctgaaccgcgccctgaccggcatcgctgttgagcaggacaagaatacccaggaggtgtttgctcaggtgaagcaaatctataagacccctcccatcaaggactttggcggcttcaacttttcccagatcctgcccgacccttccaagccctccaaacgctctttcatcgaagatctgctgttcaataaagtgaccctggccgacgccggcttcatcaagcagtacggagactgtctgggagacattgctgctcgcgacctgatttgcgcccagaagttcaacggcctgaccgtgctgccccctctgctgaccgacgagatgatcgctcagtacacctccgccctgctggctggcactatcacctccggctggactttcggcgctggcgccgccctgcagattcccttcgccatgcagatggcttatcgcttcaacggaatcggagtgacacagaacgtgctgtacgagaatcagaaactgatcgctaaccagtttaattccgccattggcaagatccaggactccctgtcctctactgcttccgccctgggcaagctgcaggacgtggtgaaccagaacgcccaggctctgaacaccctggtgaagcaactgtcttctaactttggagccatttcttccgtgctgaacgacatcctgtccagactggatcctcctgaggccgaggtgcagatcgaccgcctgatcactggccgcctgcagtccctgcagacttacgttacccagcaattaatccgcgctgccgagatccgcgcctccgccaacctggccgccaccaagatgtccgagtgcgttctgggccagtccaaacgcgttgacttctgcggcaagggctaccacctgatgtccttcccccagtccgctccccacggagtggtgttcctgcacgtgacctacgtgcctgcccaggagaagaacttcaccaccgcccccgccatttgccacgacggaaaggcccacttcccccgcgagggagtgttcgtttctaacggcactcactggttcgtgacccagagaaacttctacgagccccagattattaccaccgacaataccttcgtttctggcaactgcgacgtggttatcggcatcgtgaacaacaccgtgtacgaccccctgcaacccgagctggattctttcaaggaggagctggataagtactttaaaaaccatacctcccccgacgtggacctgggcgacatctctggcatcaacgcctccgtggtgaatatccagaaggagatcgatcgcctgaacgaggtggccaagaacttaaacgaatctctgatcgacctgcaggagctgggcaagtacgagcagtatattaagtggccctggtatatctggttaggctttatcgccggcctgatcgccattgttatggtgaccatcatgctgtgctgcatgacctcctgctgttcctgtttaaaaggctgctgctcctgcggatcctgctgtaaattcgacgaagacgactccgagcccgtgctgaaaggagttaagttacactatacctaaatgagaccata

SEQ ID NO: 144 - RNA, 3844 nt, synthetic construct
  source 1..3844: mol_type = other RNA
ataggtctcacatgttcgtgttcctggtgctgctgcccctggtgtcctcccagtgcgtcaacctgaccacccggacccaactgccccctgcctataccaattccttcacccggggcgtctactaccccgacaaggtgttccggtcctctgtgctccactccacccaggacctcttcctcccctttttctccaacgtgacctggttccacgccatccacgtgtctggcacaaacggaaccaagcgcttcgacaaccctgtgctccccttcaacgacggcgtgtacttcgcctccaccgagaagtccaacatcatccgcggctggatcttcggcaccaccctcgactctaagacccagtccctgctgattgtgaataacgccaccaacgtggtgatcaaggtgtgcgaatttcagttctgcaacgaccccttcctgggcgtttactaccataagaacaacaagtcctggatggagtccgagttccgggtgtattcctctgccaataactgcacctttgagtacgtgtcccagcccttcctgatggacctggagggcaagcagggcaattttaaaaacctgcgcgagttcgtgttcaagaacatcgacggctacttcaagatctattccaagcacacccctatcaacctggtgcgcgacctgccccagggcttttccgctctggagcccctggttgacctgcccatcggcatcaacatcacccgcttccagactttactggccctgcaccgctcctacctgacccccggcgattcctcttctggctggacagccggagccgctgcctactacgtgggatacctgcagccccgcaccttcctgctgaagtacaacgagaacggaaccattacagacgctgtcgactgtgctctggatcccctgtccgaaacaaagtgcaccctgaagtccttcaccgtggagaagggcatctaccagacctccaacttccgcgtgcagcccaccgagtccatcgtgagattccccaacatcactaacctgtgccccttcggcgaggtgttcaacgccacccgcttcgcctccgtgtacgcctggaaccgcaagcgcatctccaactgcgttgccgactactctgtgctctacaactccgcctccttctccaccttcaagtgctacggcgtgtcccccaccaagctgaacgacctgtgcttcaccaacgtgtacgccgactccttcgtgatccgcggcgacgaggtgcgccagatcgcccccggccagaccggaaagatcgccgattacaattacaagctgcccgacgacttcaccggctgcgtgatcgcctggaactccaacaatctggactccaaggttggcggcaactacaactacctgtaccgcctgttccgcaagtccaacctgaagcccttcgagcgggacatttccacagagatttaccaggctggctccaccccctgtaacggagtggagggcttcaactgctacttccccctgcagtcctacggcttccagcccaccaacggcgtgggctaccagccctaccgcgtggtggtgctgtccttcgagctgctgcacgcccctgccaccgtgtgcggccccaagaagtccaccaacctggtgaagaacaagtgcgtgaacttcaacttcaacggactgacaggcaccggcgtgctgaccgagtccaacaagaagttcctgcccttccagcagttcggccgggacattgccgacaccaccgacgccgtgcgcgacccccagaccctggagatcctggacatcaccccctgctccttcggcggagtgtccgtgatcacccccggcaccaacacctccaaccaggttgccgtgctgtaccaggacgttaactgcaccgaggtgcccgtggccatccacgccgaccagctgacccccacctggcgcgtgtactccaccggctccaacgtgttccagacccgcgccggctgcctgatcggcgccgagcacgtgaacaactcctacgagtgcgacatccccattggcgccggcatctgcgcctcctaccagacccagaccaactcccctcgccgcgcccggtccgtcgcctcccagtccatcatcgcctacaccatgtccctgggcgccgagaactccgtggcctactccaacaactccattgccatccccaccaacttcaccatctccgtgaccaccgaaatcctccccgtgtccatgaccaagacctccgtggactgcaccatgtacatctgcggcgactccaccgagtgctccaacctgctgctgcagtacggctccttctgcacccagctgaatcgcgccctgaccggcatcgccgtggagcaggacaagaacacccaagaggtgttcgcccaggtgaagcagatctacaagacacctcccatcaaggacttcggcggcttcaacttctcccagatcctgcccgacccctccaagccctccaagcgctccttcatcgaggacctgctgttcaacaaggtgaccctggccgacgccggcttcatcaagcagtacggcgactgtctgggagacattgccgcccgcgacctgatctgcgcccagaagttcaacggcttaaccgtgctgccccctctgctgaccgacgagatgatcgcccagtacacatccgctctgctggccggcaccatcacctccggctggacctttggcgctggcgctgccctgcagatccccttcgctatgcagatggcctaccgcttcaacggcatcggcgtgacccagaacgtgctgtacgagaaccagaagctgatcgccaaccagttcaactccgccatcggcaagatccaggactccctgtcctccaccgcctccgccctgggcaagctgcaggacgtggtgaaccagaacgcccaggccctgaacaccctggtgaagcagctgtcctctaacttcggcgccatctcctccgtgctgaacgacattctgtcccgcctggatcctcctgaggccgaggtgcaaatcgatcgcctcatcaccggccgcctgcagtccctgcagacctacgtgacacagcagctgatccgcgccgccgagatccgcgcctccgccaacctggccgccaccaagatgtctgagtgcgtgctgggccagtccaaacgcgttgacttctgcggcaagggctaccacctgatgtccttcccccagtccgccccccacggcgtggtgttcctgcacgtgacctacgtgcccgcccaggagaagaacttcactaccgcccccgccatctgccacgacggcaaggcccacttcccccgcgagggcgtgttcgtgtccaacggcacccactggttcgtgacccagcgcaacttctacgagccccagatcatcaccaccgacaacaccttcgtgtccggcaactgcgacgtggtgattggcatcgtgaacaacaccgtgtacgaccccctgcagcccgagctggactccttcaaggaggagctggacaagtactttaagaaccacacctcccccgacgtggacctgggcgacatctccggcatcaacgcctccgtggtgaacatccagaaggagatcgaccgcctgaacgaggtggccaagaacctgaacgagtccctgatcgacctgcaggagctgggcaagtacgaacagtacatcaagtggccctggtacatctggctgggcttcatcgccggcctgatcgccatcgtgatggtgaccatcatgctgtgctgcatgacctcttgctgttcctgtctgaagggctgctgctcctgcggctcctgctgcaagttcgacgaggacgactccgagcccgtgctgaagggcgtgaagctgcactacacctaaatgagaccata

SEQ ID NO: 145 - RNA, 3844 nt, synthetic construct
  source 1..3844: mol_type = other RNA
ataggtctcacatgttcgtgttcctggtgctgctccccctggtgagctcccagtgcgtcaacctgaccacacggacccagctgccccccgcctataccaacagcttcacccgcggcgtctactaccccgacaaggtgttccggagcagcgtgctgcacagcacccaggacctcttcctccccttttttagcaacgtgacctggttccacgccatccacgtgagtggcaccaacggcaccaagcggttcgacaaccctgtgctccccttcaacgacggcgtgtacttcgctagcacagaaaaaagtaacatcattcggggctggatcttcggcaccacactggatagcaaaacccagagcctgctgattgtgaataacgccaccaacgtggtgatcaaggtgtgcgagttccagttctgcaacgaccccttcctgggcgtgtactaccacaagaacaacaagagctggatggagagcgagttccgcgtgtatagctctgccaacaactgcaccttcgagtacgtgagccagcccttcctgatggacctggagggcaagcagggcaatttcaaaaacctgcgggagttcgtgttcaagaacatcgacggctacttcaagatctacagcaagcacacccccatcaacctggtgcgggacctgccccagggctttagcgctctggagcccctggtggacctgcccatcggcatcaacatcacccgcttccaaaccctgttggccctgcaccggagctacctgacccctggcgatagcagtagtggctggacagccggagccgccgcctactacgtgggatacctgcagccccggaccttcctgctgaagtacaacgagaacggcacaatcacagacgccgtggactgcgccctggaccccctgagcgaaacaaagtgcaccctcaaaagtttcaccgtggagaagggcatctaccagaccagcaacttccgggtgcagcccaccgagagcatcgtgcggttccccaacatcaccaacctgtgccccttcggcgaggtgttcaacgccacccggttcgccagcgtgtacgcctggaaccggaagcggatcagcaactgcgtggccgactacagcgtgctgtataacagtgccagcttcagcaccttcaagtgctacggcgtgagccccaccaagctgaacgacctgtgcttcaccaacgtgtacgccgacagcttcgtgatccggggcgacgaggtgcggcagatcgcccccggccagaccggcaagatcgccgattacaattacaagctgcccgacgatttcaccggctgcgtgatcgcctggaacagcaacaacctggacagcaaggtgggcggcaactacaactacctgtaccggctgttccgcaaaagtaacctgaagcccttcgagcgggacatcagcaccgagatctaccaggccggcagtaccccttgcaacggcgtcgagggcttcaactgctacttccccctgcagagctacggcttccagcccaccaacggcgtgggctaccagccctaccgggtggtggttctgagcttcgagctgctgcacgcccctgccaccgtgtgcggccccaagaaaagcaccaacctggtgaagaacaagtgcgtgaatttcaattttaacggactcaccggaaccggcgtgctgaccgagagcaacaagaagttcctgcccttccagcaattcggccgggatattgccgacaccactgacgccgtgcgggacccccagaccctggagatcctggacatcacaccctgtagcttcggcggggtgagcgtgatcacccccggcaccaacaccagcaaccaggtggccgtgctgtaccaggacgtgaactgcaccgaggtgcccgtggccatccacgccgaccagctgacccccacctggcgggtgtacagcaccggcagcaacgtgttccagacccgggccggctgcctgatcggcgccgagcacgtgaataacagctacgagtgcgacatccccatcggagccggaatctgcgccagctaccagacccagaccaacagcccccggagagcccggagcgtggccagccagagcattattgcctacaccatgagcctgggcgccgagaacagcgtggcctacagcaacaatagtattgccatccccaccaacttcaccatcagcgtgaccaccgaaatcctccccgtgagcatgaccaagaccagcgtggactgcaccatgtacatctgcggcgacagcaccgagtgcagcaacctgctcctgcagtacggcagcttctgcacccagctgaaccgggccctgaccggaattgccgtggagcaggacaagaacacccaggaggtgttcgcccaggtgaagcagatctacaagacacctcccatcaaggacttcggcggcttcaacttcagccagatcctgcccgaccccagcaagcccagcaagcggagcttcatcgaggacctgttgttcaacaaggtgaccctggccgacgccggcttcatcaagcagtacggcgactgtctgggagatattgccgcacgggacctgatctgcgcccagaagttcaacggcctgaccgtgctgcccccactgctgaccgacgagatgatcgcccagtacacaagcgctctgctcgccggcaccatcaccagcggctggaccttcggcgccggcgctgccctgcagatccccttcgccatgcagatggcctaccggttcaacggcatcggcgtgacccagaacgtgctgtacgagaaccagaagctgatcgccaaccagttcaacagcgccatcggcaagatccaggacagcctgagctccaccgccagcgccctgggcaagctgcaggacgtggtgaaccagaacgcccaggccctgaacaccctggtgaagcagctgagcagcaacttcggcgccatcagctctgtgctgaacgacatcctgagccggctggatcctcctgaggccgaggtgcaaatcgatcggctcatcaccggccggctgcagagcctgcagacctacgtgacacagcagctgatccgggccgccgagatccgggccagcgccaacctggccgctaccaagatgagcgagtgcgtgctgggccagagcaagcgggtggacttctgcggcaagggctaccacctgatgagcttcccccagagcgccccccacggcgtggtgttcctgcacgtgacctacgtgcccgcccaggagaagaacttcaccaccgcccccgccatctgccacgacggcaaggcccacttcccccgggagggcgtgttcgtgagcaacggcacccactggttcgtgacccagcggaacttctacgagccccagatcataaccacagacaacaccttcgtgagcggcaactgcgacgtggtcatcggcatcgtgaacaacaccgtgtacgaccccctgcagcccgagctggacagcttcaaggaggaactggacaagtacttcaagaaccacaccagccccgacgtggacctgggcgacatcagcggcatcaacgccagcgtggtgaacatccagaaggagatcgaccggctgaacgaggtggccaagaacctgaacgagagcctgatcgacctgcaggagctgggcaagtacgagcagtacatcaagtggccctggtacatctggctgggctttattgccggcctgatcgccatcgtgatggtgaccatcatgctgtgctgtatgacaagctgttgcagttgcctgaagggctgctgcagctgcggcagctgctgcaagttcgacgaggacgacagcgagcccgtgctgaagggcgtgaagctgcactacacctaaatgagaccata

SEQ ID NO: 146 - RNA, 4588 nt, synthetic construct
  source 1..4588: mol_type = other RNA
ataggtctcacacattaaaacagcctgtgggttgatcccacccacaggcccattgggcgctagcactctggtatcacggtacctttgtgcgcctgttttataccccctcccccaactgtaacttagaagtaacacacaccgatcaacagtcagcgtggcacaccagccacgttttgatcaagcacttctgttaccccggactgagtatcaatagactgctcacgcggttgaaggagaaagcgttcgttatccggccaactacttcgaaaaacctagtaacaccgtggaagttgcagagtgtttcgctcagcactaccccagtgtagatcaggtcgatgagtcaccgcattccccacgggcgaccgtggcggtggctgcgttggcggcctgcccatggggaaacccatgggacgctctaatacagacatggtgcgaagagtctattgagctagttggtagtcctccggcccctgaatgcggctaatcctaactgcggagcacacaccctcaagccagagggcagtgtgtcgtaacgggcaactctgcagcggaaccgactactttgggtgtccgtgtttcattttattcctatactggctgcttatggtgacaattgagagatcgttaccatatagctattggattggccatccggtgactaatagagctattatatatccctttgttgggtttataccacttagcttgaaagaggttaaaacattacaattcattgttaagttgaatacagcaacatgtttgttttcttagttttattacctttagtttcttcccagtgtgttaatttaactactagaactcaattacctcctgcttatactaattcttttactagaggagtgtattatcctgataaggtttttagatcttctgttctgcactctactcaggatttgttcttgcccttcttctctaacgtgacctggttccacgctattcacgtttctggaaccaacggcactaagagatttgataatcccgttttgccttttaacgacggagtttatttcgcctctaccgaaaaatctaacatcattaggggctggatctttggaactaccctggattctaaaactcaatctttattgattgtgaataacgctaccaacgttgtgattaaagtttgtgaatttcaattttgtaacgatccttttctgggagtttattatcataaaaacaataaatcttggatggaatctgaattccgcgtttattcttctgccaataactgtacctttgagtacgtttctcaacctttcttaatggatttagaaggaaaacaaggcaatttcaaaaacttaagagaatttgtttttaaaaatattgacggatattttaaaatttattctaagcatactcctattaatttagtgagagacttaccccaaggattttctgctttagaacctttagttgacttacctattggaatcaatatcactagatttcaaactttattagctttacatagatcttatttaactcctggagattcttcctccggctggacagccggagccgctgcttattacgttggatatttacagcctagaacttttctgctgaaatataacgaaaacggaaccattaccgacgccgttgactgtgctctggatcctttatctgaaaccaagtgtactttaaaatcttttaccgttgaaaaaggaatttatcaaacttctaattttagagttcaacctactgaatctatcgttagattccctaatattactaatttgtgtccctttggagaggttttcaacgctactagatttgcctctgtttacgcttggaatcgcaagagaatttctaattgtgtggccgattactccgttttgtataactctgcttctttctctacttttaagtgttacggagtttcccctactaaactgaacgatttgtgttttactaacgtttacgctgattcttttgttattagaggcgacgaagttagacaaattgctcctggacaaactggaaagattgctgactataactataaactgcctgacgattttaccggctgtgttattgcttggaattctaataatttagattctaaagttggaggaaattataattatttatatagattatttagaaaatctaatttaaaaccttttgaaagagatatttccactgagatttaccaggctggatctactccttgtaacggcgttgagggatttaattgttattttcctttacaatcttacggatttcaacctaccaacggagttggatatcaaccttacagagttgtggtgctgtcttttgaattattacacgctcccgctactgtttgcggccctaaaaagtctactaatctggttaagaataagtgtgtgaattttaatttcaacggattgaccggaactggagttctgactgaatctaataaaaaatttttaccctttcaacaatttggaagggatatcgctgatactactgacgctgttagagatcctcaaactttagaaatcctggatattactccttgttcttttggaggagtttccgttattactcctggcactaatacttctaatcaagttgctgttttatatcaagacgttaattgcaccgaagttcctgttgctattcacgctgatcagttaactcctacttggagagtttattctactggatctaacgtttttcaaaccagagctggctgtttaatcggagctgaacacgtgaataattcttacgagtgcgatattcccatcggagctggaatttgtgcctcttatcaaactcaaaccaattctcctaggagggctagatccgttgcctctcaatctattattgcttataccatgtctttaggagctgaaaattccgttgcttactctaacaattctattgctattcctactaactttactatttctgttactactgaaattctgcccgtgtccatgactaaaacttctgttgattgtactatgtatatttgtggagattccactgagtgttctaacctgttattacaatacggatctttttgtactcaattaaatagagctctgactggaattgctgttgaacaggacaaaaatactcaagaagtttttgcccaagttaaacagatttataaaactcctcctattaaagattttggaggatttaatttctctcaaattttacctgacccttctaagccttccaaaaggtctttcatcgaagatttattatttaataaagttaccttagccgacgctggatttattaagcaatacggagattgcttaggcgatatcgctgctagagacttaatttgtgctcaaaaatttaacggattaactgttttacctcccctgttaactgacgaaatgatcgctcaatatacttctgctctgttagctggaactattacttctggctggacttttggagctggagctgctttacaaattccctttgctatgcagatggcttatagatttaacggaattggagttactcaaaacgttttatacgaaaatcaaaaattaattgctaatcaatttaattctgctattggaaaaattcaagattccctgtcttctactgcttccgctctgggaaaattacaagacgttgttaatcaaaacgctcaagctttgaataccttagttaaacaattatcttccaattttggagctatttcttctgttttaaacgacattttatctagattagatccccctgaagctgaagttcagattgacagattgattaccggaagattacaatctttacaaacttacgttactcaacaactgattagagctgctgaaattagagcctctgctaatttagctgctactaagatgtctgagtgtgttttaggacagtccaaaagagttgatttttgtggaaaaggctatcatctgatgtcttttcctcaatctgctcctcacggagttgtgtttttacacgttacttacgttcctgctcaagagaagaattttactactgctcctgctatttgtcacgacggaaaagctcattttcctagagaaggagtttttgtttctaacggaactcattggtttgttactcaaagaaacttttacgaacctcagattattaccactgataatacctttgtttctggcaattgtgacgtggttattggaattgttaataatactgtttacgatcctttacaacccgaactggattcttttaaagaagaattagataaatactttaaaaatcatacttctcccgacgttgatttaggagatatctctggaattaacgcttctgttgtgaatattcaaaaggaaattgatagattaaacgaagtggctaaaaatttaaacgagtctttaattgatttacaggaactgggaaaatacgaacaatatattaagtggccttggtacatttggttaggctttattgctggactgattgctattgtgatggttactatcatgttgtgttgcatgacttcttgttgttcctgtttaaaaggctgttgctcttgtggatcttgttgcaaatttgacgaagacgattctgaacctgttctgaaaggagttaaactgcattatacttaaatgagaccata

SEQ ID NO: 147 - RNA, 4588 nt, synthetic construct
  source 1..4588: mol_type = other RNA
ataggtctcacacattaaaacagcctgtgggttgatcccacccacaggcccattgggcgctagcactctggtatcacggtacctttgtgcgcctgttttataccccctcccccaactgtaacttagaagtaacacacaccgatcaacagtcagcgtggcacaccagccacgttttgatcaagcacttctgttaccccggactgagtatcaatagactgctcacgcggttgaaggagaaagcgttcgttatccggccaactacttcgaaaaacctagtaacaccgtggaagttgcagagtgtttcgctcagcactaccccagtgtagatcaggtcgatgagtcaccgcattccccacgggcgaccgtggcggtggctgcgttggcggcctgcccatggggaaacccatgggacgctctaatacagacatggtgcgaagagtctattgagctagttggtagtcctccggcccctgaatgcggctaatcctaactgcggagcacacaccctcaagccagagggcagtgtgtcgtaacgggcaactctgcagcggaaccgactactttgggtgtccgtgtttcattttattcctatactggctgcttatggtgacaattgagagatcgttaccatatagctattggattggccatccggtgactaatagagctattatatatccctttgttgggtttataccacttagcttgaaagaggttaaaacattacaattcattgttaagttgaatacagcaacatgttcgtgttcttagtgctgttacccctggtttcttctcagtgtgtcaatttaaccaccagaacccaactgcctcctgcctatactaattcctttacccgcggagtttactatcccgataaggtttttcgctcctctgttttacactctactcaggacttattcttacccttcttctccaacgttacttggtttcacgccattcacgtttctggaaccaacggaactaagagattcgataatcctgtgttacctttcaacgacggagtttattttgcttccactgaaaaatccaatatcattaggggctggatctttggaaccactttagattccaagactcaatctttattaattgtgaataacgccaccaacgtggttatcaaagtgtgtgaattccaattttgtaacgaccctttcttaggcgtgtattatcacaaaaataataaatcttggatggaatctgaatttcgcgtttactcttccgctaacaactgcacttttgagtacgtttcccagccttttctgatggatctggaaggcaaacagggaaattttaaaaatctgagagaatttgtttttaagaacattgacggatatttcaagatctattctaaacacactcccatcaatttggttagagatttacctcagggcttttctgctttagaacctttagttgacctgcctattggaatcaacattactagatttcaaactctgttagctctgcatagatcttatttaactcctggagattcctcctccggctggaccgccggagctgctgcttattacgttggctatttacaacccagaacttttctgttaaaatataacgaaaacggcaccatcactgacgccgtggattgtgctttagatcccttatccgaaactaagtgtactctgaaatccttcactgttgaaaaaggaatttatcagacctctaattttagagtgcaacctaccgaatctattgttagatttcctaatattaccaacttgtgcccttttggcgaagttttcaacgctactagatttgcttctgtttacgcttggaatagaaaaagaatttctaactgtgtggctgactattccgtgttatacaattctgcctctttttctacttttaagtgttacggagtgtctcccactaaactgaacgatttgtgctttaccaacgtttacgctgattcttttgttattagaggcgacgaggttcgccagattgcccctggccagactggcaaaattgctgactataactataaattacctgacgattttaccggctgcgttatcgcttggaactctaataatctggattctaaagttggaggaaactacaattatttatatagattatttagaaaatctaatttaaaacccttcgagagggatatctctactgaaatctaccaagctggatctactccttgcaacggcgttgaaggatttaattgttattttcctttacaatcttacggattccaacctactaacggagttggatatcagccttatagagtggtggttttatctttcgaattattacacgctcccgctactgtgtgtggacccaaaaagtctactaatttagttaaaaataagtgtgttaatttcaattttaacggactcactggcactggagtgttaactgaatctaataaaaagttcttacctttccaacagttcggacgcgacattgccgacaccactgacgctgtgagagatcctcaaaccttagagattctggatattaccccttgttcctttggaggcgtttccgttatcactcccggaactaacacttctaatcaggttgccgttttatatcaggacgttaattgcactgaagttcctgttgctattcacgctgatcaactgactcctacttggagagtttattccactggatctaacgtttttcagactcgcgccggctgtttaattggagctgaacacgtgaacaactcctacgagtgcgatattcctattggcgctggcatctgtgcttcttatcaaactcaaactaattctcccaggagggctcgctctgttgcttcccaatctatcattgcttatactatgtccttaggcgctgaaaattctgttgcttattccaacaattctattgctattcccaccaattttactatttctgtgactactgaaattttacctgtttccatgactaagacttctgttgattgtactatgtatatctgcggagattctactgagtgttccaacctcttattacagtacggatctttttgcactcagttaaatagagctctgactggaatcgctgttgaacaagacaaaaacacccaagaagtgtttgctcaggtgaagcaaatttacaagacacctcctattaaggattttggaggattcaatttttcccagattttacctgatccttctaaaccttctaaacgctcctttattgaagatttactgttcaataaagtgactctggctgacgctggcttcatcaagcaatacggcgattgtttaggagacatcgctgctagagacttaatttgtgctcaaaaattcaacggactgactgttctgccccctttactgaccgacgagatgatcgcccaatatacttctgccctgttagctggcaccattacttctggctggacctttggagctggcgctgctttacaaattcctttcgccatgcagatggcttatcgctttaacggaattggcgttacccaaaacgtgttatacgagaatcaaaaattaatcgccaatcaatttaattctgctattggcaagattcaagattctttatcttctactgcttccgccctgggcaaactgcaggacgttgttaaccagaacgctcaagccctgaacactttagtgaagcaactgtcttctaacttcggcgctatttcttccgttttaaacgacattctgtctcgcttagatccccctgaggctgaggttcaaattgatagactgattactggaagattacagtccctgcaaacttacgttactcaacagttaatcagagctgctgaaatccgcgcttccgctaatttagctgctactaaaatgtctgagtgtgtgttaggccagtctaagagagttgacttttgtggcaagggctatcatttaatgtcttttcctcagtccgctcctcacggcgttgtgttcttacacgtgacttacgttcccgcccaagagaaaaattttaccactgctcctgctatttgtcacgacggaaaagctcattttcctagagaaggagtgtttgtttctaacggaacccactggtttgtgactcaaagaaacttttacgaaccccaaattattactactgacaatactttcgtttccggcaactgtgacgtggtgatcggaattgttaataacaccgtttacgatcccttacaacctgaattagattcttttaaagaagaattagataaatatttcaaaaatcatacttcccctgacgttgatctgggagatatttctggaattaacgcttctgtggtgaacattcaaaaagagattgacagattaaacgaagttgctaaaaacctgaacgagtccctgatcgacctgcaggaactgggaaaatacgagcagtatattaagtggccttggtatatttggttaggatttattgctggattaattgctattgtgatggtgaccattatgttgtgctgtatgacctcttgttgttcttgcctgaagggctgctgttcttgtggctcttgttgcaagtttgacgaagacgattccgaacccgttttaaagggagtgaaactgcattatacttaaatgagaccata

SEQ ID NO: 148 - RNA, 4588 nt, synthetic construct
  source 1..4588: mol_type = other RNA
ataggtctcacacattaaaacagcctgtgggttgatcccacccacaggcccattgggcgctagcactctggtatcacggtacctttgtgcgcctgttttataccccctcccccaactgtaacttagaagtaacacacaccgatcaacagtcagcgtggcacaccagccacgttttgatcaagcacttctgttaccccggactgagtatcaatagactgctcacgcggttgaaggagaaagcgttcgttatccggccaactacttcgaaaaacctagtaacaccgtggaagttgcagagtgtttcgctcagcactaccccagtgtagatcaggtcgatgagtcaccgcattccccacgggcgaccgtggcggtggctgcgttggcggcctgcccatggggaaacccatgggacgctctaatacagacatggtgcgaagagtctattgagctagttggtagtcctccggcccctgaatgcggctaatcctaactgcggagcacacaccctcaagccagagggcagtgtgtcgtaacgggcaactctgcagcggaaccgactactttgggtgtccgtgtttcattttattcctatactggctgcttatggtgacaattgagagatcgttaccatatagctattggattggccatccggtgactaatagagctattatatatccctttgttgggtttataccacttagcttgaaagaggttaaaacattacaattcattgttaagttgaatacagcaacatgtttgtttttctggttttattacccttagtgtcctcccagtgcgtgaacttaactacccgcactcagctgcctcctgcctataccaactctttcactagaggcgtttactatcctgacaaagtttttagatcttctgtgctgcattccactcaagatttattcctgcccttcttttctaacgttacttggtttcacgccatccacgtgtctggcaccaacggaaccaaacgctttgacaaccctgtgttaccttttaacgacggagtttacttcgcctccactgaaaagtccaatattatccggggctggattttcggaaccaccttagattctaaaacccagtctctgctgattgtgaacaacgccactaacgtggttattaaagtgtgcgagtttcaattttgcaacgacccttttctgggagtttattaccacaaaaataacaaatcttggatggagtctgaatttagagtgtattcttccgccaataattgcaccttcgagtacgtttcccaaccctttctgatggacttagaaggaaagcaaggcaatttcaaaaacctgcgcgaatttgtgttcaaaaatattgacggctatttcaaaatttactccaagcatacccctattaatttagtgcgcgatctgcctcagggcttctctgccttagagcctttagtggacctgcctattggcattaatattactcgctttcagactttactggccctgcatagatcttatttaactcctggagactcttcttccggctggaccgctggagccgctgcctactacgttggctatctgcagcctagaacttttttattaaagtacaacgaaaacggaaccatcactgacgctgttgattgcgccctggatcctttatctgaaacaaagtgcaccctgaagtccttcaccgttgaaaagggcatttaccaaacatccaattttagggttcagcctactgaatccatcgtgcgctttcccaacatcactaacttgtgtccctttggcgaggtgtttaacgccactcgctttgcctctgtgtacgcctggaacagaaagagaatttccaattgcgtggctgattattctgtgctgtataactccgcttctttctccacctttaagtgttacggagtgtcccctactaaactgaacgacttgtgcttcaccaacgtttacgccgattcttttgtgattcgcggcgacgaagttagacaaatcgcccccggacagaccggaaagatcgctgattacaactataagttacctgacgacttcaccggctgcgtgattgcttggaattctaataacttagactctaaagttggaggcaactacaattacctgtatagattattccgcaaatctaacctgaaaccttttgagagagacatctccaccgaaatttaccaagccggctctaccccctgcaacggagttgaaggatttaattgctactttcccctgcagtcctacggattccaacctactaacggcgttggataccaaccttacagagttgtggtgctgtcttttgaattattacacgcccctgccaccgtttgtggccctaagaaatctaccaatctggttaaaaacaagtgtgtgaattttaattttaacggcctgaccggcactggcgttttaaccgagtctaacaagaagtttctgcctttccaacaatttggcagagacatcgccgacaccaccgacgctgtgcgcgatcctcaaaccttagaaattttagatattactccttgctctttcggcggcgtttccgttattactcctggaaccaatacctctaatcaagtggctgtgctgtaccaggacgttaattgcactgaagtgcctgtggctattcacgccgatcaactgacccccacttggagagtttattctactggatctaacgtgttccaaactagagctggctgtctgatcggcgccgagcacgttaataattcttacgagtgtgatatccctattggcgctggcatttgcgcctcttaccagacccagaccaactccccccgcagagctagatccgtggcctctcagtccattattgcctatactatgtccttaggagccgaaaattctgtggcttactccaacaattctattgccattcccactaattttactatctctgtgactaccgaaatcctgcccgtgtccatgactaagacctccgtggactgcaccatgtatatctgcggagactctactgagtgttccaacttattactgcagtacggctctttctgtactcagctgaatagagccctgactggaattgctgtggagcaagacaaaaatacccaggaggtgttcgctcaggtgaaacaaatttataagacccctcccatcaaagattttggaggcttcaatttttctcaaattctgcccgacccctccaagccttccaaaagatcctttattgaagatctgctgttcaataaggttactttagccgacgccggcttcattaagcagtacggagattgtctgggcgatattgctgcccgcgacctgatttgcgctcagaagttcaacggattaaccgttctgcctcctctgctgactgacgagatgattgctcagtatacttctgccctgctggctggaactattacctctggctggaccttcggcgccggagctgctctgcaaattcccttcgccatgcaaatggcttacagatttaacggcatcggagttactcaaaacgtgctgtacgaaaaccaaaaattaattgccaaccagttcaattccgctatcggcaaaattcaggattctctgtcttctactgcttccgctttaggcaaactgcaagacgttgttaaccagaacgcccaagctttaaacaccctggttaagcagctgtcctctaattttggcgctatctcttctgttctgaacgacattttatctagactggacccccctgaagccgaggtgcagattgatagattaatcaccggaagactgcaatccctgcagacctacgttacccagcaattaatcagagccgccgagatcagagcctctgccaacttagctgccaccaaaatgtccgagtgtgtgctgggacagtccaagcgcgtggacttctgtggaaagggataccacctgatgtcttttcctcaatctgctccccacggagttgtgtttctgcacgttacttacgtgcctgcccaagagaaaaactttactaccgcccccgctatttgccacgacggcaaggctcacttccctagagaaggagtttttgtgtctaacggaacccattggtttgtgactcaaagaaatttttacgagcctcaaatcattaccaccgataacacttttgtttccggcaattgtgacgtggtgattggaatcgttaacaacaccgtttacgaccctttacagcccgaattagactcttttaaagaggagttagataaatattttaaaaaccatacctctcccgacgtggacctgggagatatttccggaattaacgcttctgttgtgaatatccagaaagagatcgacagattaaacgaggttgctaaaaatttaaacgaatccctgattgacctgcaggagctgggcaaatacgaacaatatattaagtggccttggtatatttggttaggcttcatcgctggattaatcgctattgttatggtgactattatgttgtgttgtatgacttcctgctgttcttgcttaaaaggctgctgttcctgcggatcctgttgtaaattcgacgaggacgattccgagcctgttttaaaaggagtgaaattacattatacttaaatgagaccata

SEQ ID NO: 149 - RNA, 4588 nt, synthetic construct
  source 1..4588: mol_type = other RNA
ataggtctcacacattaaaacagcctgtgggttgatcccacccacaggcccattgggcgctagcactctggtatcacggtacctttgtgcgcctgttttataccccctcccccaactgtaacttagaagtaacacacaccgatcaacagtcagcgtggcacaccagccacgttttgatcaagcacttctgttaccccggactgagtatcaatagactgctcacgcggttgaaggagaaagcgttcgttatccggccaactacttcgaaaaacctagtaacaccgtggaagttgcagagtgtttcgctcagcactaccccagtgtagatcaggtcgatgagtcaccgcattccccacgggcgaccgtggcggtggctgcgttggcggcctgcccatggggaaacccatgggacgctctaatacagacatggtgcgaagagtctattgagctagttggtagtcctccggcccctgaatgcggctaatcctaactgcggagcacacaccctcaagccagagggcagtgtgtcgtaacgggcaactctgcagcggaaccgactactttgggtgtccgtgtttcattttattcctatactggctgcttatggtgacaattgagagatcgttaccatatagctattggattggccatccggtgactaatagagctattatatatccctttgttgggtttataccacttagcttgaaagaggttaaaacattacaattcattgttaagttgaatacagcaacatgttcgtgttcctggtgctgctgcccttagtgtcctcccagtgtgtgaacctgaccaccagaacccagttacctcccgcttacaccaactcctttacccgcggagtgtactaccctgataaggtttttagatcctccgttctgcattctacccaagacctgtttttacccttcttttccaacgtgacctggttccacgctatccacgtgtccggcactaacggcactaagcgcttcgacaatcctgtgctcccttttaacgacggcgtgtacttcgcttctaccgaaaaatccaacatcatccgcggctggatcttcggaactaccctggattctaaaacccagtctttattaatcgtgaataacgccaccaacgtggttattaaggtctgtgagttccaattttgcaacgaccctttcttaggcgtttattaccacaaaaacaataagtcttggatggagtccgaattccgcgtgtactcctctgccaacaattgcacctttgagtacgtgtcccagcccttcctgatggacctggaaggcaagcagggcaattttaaaaatctgcgcgaattcgttttcaagaacatcgacggctactttaagatttattccaaacatacccccatcaacctggtgcgcgatttaccccagggcttctccgccttagagcccttagtggatctgcctatcggcatcaatatcacccgctttcagactctgctggccctgcacagatcctacctgactcccggagactcttcttctggctggaccgccggagctgccgcctactacgtgggctacctgcaaccccgcacctttctgctgaagtacaacgaaaacggcaccatcacagacgccgttgactgcgctctggaccccctgtctgagactaagtgcaccctgaagtccttcactgtggagaaaggaatctaccagacctccaacttccgcgtgcagcctaccgaatccattgttcgcttccctaacattactaatctgtgccccttcggagaagttttcaacgccactagattcgcttccgtgtacgcctggaatcgcaagcgcatctccaattgcgttgctgactactctgtgttatacaattccgcctctttttccactttcaagtgctacggcgtgtctcctaccaagctgaacgacctgtgtttcactaacgtgtacgctgattcctttgttatccgcggcgacgaggtgagacagatcgcccctggccagaccggaaaaatcgccgactacaactacaagttacccgacgattttaccggctgtgttattgcttggaactctaataatctggactctaaagtgggcggcaattacaactacttatatcgcctgttcagaaaatccaacctgaaacccttcgaacgggacatttccaccgaaatttatcaggccggctccaccccctgcaacggagtggagggcttcaattgctacttccccctgcaatcctacggctttcagcccaccaacggcgtgggataccagccctaccgcgttgttgtgttatcctttgaactgctgcacgctcctgctactgtgtgcggacctaaaaaatccaccaatctggtgaagaacaagtgtgtgaattttaattttaacggcctgaccggcaccggagtgctgaccgagtccaacaaaaagtttctgccctttcagcagttcggccgggacattgccgacactaccgacgctgtgagggatcctcagaccctggagattctggacattaccccttgctccttcggaggagtttccgtgatcacccctggcaccaatacttctaaccaagtggctgttttataccaggacgtgaattgtactgaggtgcctgtggccatccacgccgatcaattaactcccacctggagagtgtattccaccggctctaacgttttccaaacccgcgctggctgcttaatcggcgctgagcacgtgaacaactcctacgagtgtgatattcctatcggagccggcatctgtgcttcctaccagactcagaccaactcccccagacgcgctaggtccgtggcttcccagtctattatcgcttatactatgtccctgggagccgagaattctgttgcctattccaataactccatcgccattcctaccaactttaccatctctgtgaccaccgagattctgcccgtgtccatgaccaaaacttctgtggattgtaccatgtacatctgtggagattccaccgagtgctctaacctgctgctgcagtacggctccttttgcacccaattaaaccgcgctctgactggcatcgccgtggagcaagataaaaacacccaagaggtgttcgctcaggtgaagcagatctacaagacacctcccattaaagatttcggaggctttaatttctctcagatcctgcccgacccttctaagccctctaaacgctccttcatcgaggatctgctgttcaacaaggttaccctggccgacgctggctttatcaaacagtacggcgactgcttaggcgacatcgccgcccgcgatttaatttgcgctcagaagttcaacggactgaccgtgctgcctcctctgctgaccgacgaaatgatcgcccaatacacctccgccctgctggctggcactatcacctccggctggacctttggcgctggagccgctctgcaaatccctttcgctatgcagatggcttaccgctttaacggaatcggcgtgacccagaacgtgttatacgaaaatcagaaattaattgccaatcaatttaactctgccatcggcaagattcaggattctctgtcttctactgcctctgccttaggaaaactgcaggacgtggtgaatcagaacgcccaggccctgaataccctggttaagcaactgtcttccaatttcggcgctatctcctctgtgttaaacgacattctgtcccgcctggatcctcctgaggccgaagtgcaaattgaccgcttaatcactggcagactgcaatccctgcaaacctacgttactcaacagctgatcagagccgccgaaatccgcgcttctgccaacttagctgctaccaagatgtccgagtgcgtgctgggacagtccaaaagagttgacttttgcggaaagggctaccacctgatgtcctttccccagtccgccccccacggagttgttttcctgcacgttacttacgttcctgctcaagagaagaacttcaccaccgctcccgctatttgccacgacggcaaggctcatttccccagagagggagtgtttgtgtccaacggcactcactggtttgttactcagcgcaacttctacgaacctcagatcatcaccactgacaatacctttgtgtccggaaactgtgacgtggttatcggcattgtgaacaatactgtgtacgaccctttacaacctgagctggattcttttaaagaagaactggacaagtacttcaagaaccacacctcccccgacgtggatctgggcgacatctccggcatcaacgcctctgtggtgaatattcagaaggagattgatcgcctgaacgaggttgccaagaatctgaacgagtctctgatcgacctgcaggagctgggcaagtacgaacagtacatcaagtggccctggtacatttggctgggctttattgctggactgatcgctatcgttatggttaccatcatgctgtgctgtatgacctcttgctgctcctgtctgaaaggctgttgctcctgcggctcctgttgtaagtttgacgaggacgactccgagcctgttctgaaaggagttaaactgcactacacctaaatgagaccata

SEQ ID NO: 150 - RNA, 4588 nt, synthetic construct
  source 1..4588: mol_type = other RNA
ataggtctcacacattaaaacagcctgtgggttgatcccacccacaggcccattgggcgctagcactctggtatcacggtacctttgtgcgcctgttttataccccctcccccaactgtaacttagaagtaacacacaccgatcaacagtcagcgtggcacaccagccacgttttgatcaagcacttctgttaccccggactgagtatcaatagactgctcacgcggttgaaggagaaagcgttcgttatccggccaactacttcgaaaaacctagtaacaccgtggaagttgcagagtgtttcgctcagcactaccccagtgtagatcaggtcgatgagtcaccgcattccccacgggcgaccgtggcggtggctgcgttggcggcctgcccatggggaaacccatgggacgctctaatacagacatggtgcgaagagtctattgagctagttggtagtcctccggcccctgaatgcggctaatcctaactgcggagcacacaccctcaagccagagggcagtgtgtcgtaacgggcaactctgcagcggaaccgactactttgggtgtccgtgtttcattttattcctatactggctgcttatggtgacaattgagagatcgttaccatatagctattggattggccatccggtgactaatagagctattatatatccctttgttgggtttataccacttagcttgaaagaggttaaaacattacaattcattgttaagttgaatacagcaacatgtttgtgtttctggtgctgctgcctctggtgtcctctcagtgtgttaacctgaccaccagaacccaactgccccccgcctacactaactctttcactcgcggcgtgtactaccccgataaagttttcagatcctccgtgctccattctacccaagacctgttcttaccctttttctccaacgtgacctggttccacgccatccacgtgtccggcactaacggaaccaagcgcttcgataatcccgtgctgcctttcaacgacggagtttactttgcttccaccgagaagtccaatattatccggggctggatcttcggcaccacactggattccaaaacccagtccttactgattgtgaacaacgccactaacgtggtgatcaaggtgtgtgagttccagttctgtaacgacccctttctgggcgtgtattatcataaaaacaacaagtcctggatggagtccgagtttagagtgtattcttccgctaacaactgcaccttcgaatacgtgtcccagcctttcctgatggatctggaaggaaagcagggcaacttcaagaacttacgcgagttcgtgttcaagaacatcgacggctacttcaaaatttactccaagcacacccctatcaacttagtgagagatctgccccagggcttctccgctctggaacctctggtggacttacccattggcatcaacatcactcgcttccaaacactgctcgctctgcaccgctcttatctgacccccggcgactcctcttctggctggaccgccggcgccgctgcctattacgtgggatacctgcaaccccgcacctttctgctgaaatacaacgaaaacggcaccatcacagacgctgtggactgcgctctggaccccctgtccgagactaagtgcaccctgaagtccttcaccgttgaaaagggcatttatcagacttccaacttccgcgtgcagcctactgagtccattgtgcgcttccctaacatcactaacttgtgtcctttcggcgaagtgttcaacgctactcgcttcgcctccgtgtacgcctggaaccgcaagagaatctccaattgcgtggccgactactctgttctctacaactctgcctccttctccacctttaagtgctacggcgtgtcccccaccaaactgaacgacctgtgcttcaccaacgtgtacgccgactcctttgtgatcagaggcgacgaggtgcgccagatcgcccccggccagactggcaagatcgccgattacaattacaagctgcctgacgactttaccggctgcgtgattgcctggaactccaacaacctggactccaaagtgggcggcaactacaactacctgtaccgcctgtttagaaaatccaacctgaagcccttcgagcgggacatttctactgagatctaccaggccggctccaccccctgtaacggcgtggaaggcttcaactgctactttcccctgcagtcctacggcttccagcctaccaacggcgtgggctaccagccctaccgcgtggtggtgttatccttcgagctgctgcacgcccctgccaccgtgtgcggacccaaaaagtctactaacctggttaagaataagtgtgttaatttcaattttaacggcttaaccggaaccggagtgctgaccgagtccaataaaaagttcctgccctttcagcagtttggccgcgacatcgccgatactaccgacgccgtgcgcgatccccagaccctggagatcctggacattaccccctgctctttcggcggagtgtccgtgatcacccccggcaccaatacctccaatcaggtggccgttctgtaccaggacgtgaattgcaccgaagtgcccgtggccattcacgccgaccagttaactcctacttggagagtgtactccaccggctctaacgtgtttcagacccgcgccggctgtctgatcggcgccgagcacgtgaacaactcctacgagtgcgacattcccattggcgccggcatctgcgcctcctaccaaacccagactaactctcccagacgcgcccgctctgtggcctctcagtccatcatcgcttacactatgtccctgggcgccgagaactccgtggcctattccaacaactccatcgccatccccactaacttcaccatctctgtgaccaccgaaatcctccccgtgtctatgactaagacttccgtggactgtaccatgtacatttgcggcgactccaccgagtgttccaatctgctgctgcagtacggctccttttgcacccagctgaaccgcgccctgaccggcatcgctgttgagcaggacaagaatacccaggaggtgtttgctcaggtgaagcaaatctataagacccctcccatcaaggactttggcggcttcaacttttcccagatcctgcccgacccttccaagccctccaaacgctctttcatcgaagatctgctgttcaataaagtgaccctggccgacgccggcttcatcaagcagtacggagactgtctgggagacattgctgctcgcgacctgatttgcgcccagaagttcaacggcctgaccgtgctgccccctctgctgaccgacgagatgatcgctcagtacacctccgccctgctggctggcactatcacctccggctggactttcggcgctggcgccgccctgcagattcccttcgccatgcagatggcttatcgcttcaacggaatcggagtgacacagaacgtgctgtacgagaatcagaaactgatcgctaaccagtttaattccgccattggcaagatccaggactccctgtcctctactgcttccgccctgggcaagctgcaggacgtggtgaaccagaacgcccaggctctgaacaccctggtgaagcaactgtcttctaactttggagccatttcttccgtgctgaacgacatcctgtccagactggatcctcctgaggccgaggtgcagatcgaccgcctgatcactggccgcctgcagtccctgcagacttacgttacccagcaattaatccgcgctgccgagatccgcgcctccgccaacctggccgccaccaagatgtccgagtgcgttctgggccagtccaaacgcgttgacttctgcggcaagggctaccacctgatgtccttcccccagtccgctccccacggagtggtgttcctgcacgtgacctacgtgcctgcccaggagaagaacttcaccaccgcccccgccatttgccacgacggaaaggcccacttcccccgcgagggagtgttcgtttctaacggcactcactggttcgtgacccagagaaacttctacgagccccagattattaccaccgacaataccttcgtttctggcaactgcgacgtggttatcggcatcgtgaacaacaccgtgtacgaccccctgcaacccgagctggattctttcaaggaggagctggataagtactttaaaaaccatacctcccccgacgtggacctgggcgacatctctggcatcaacgcctccgtggtgaatatccagaaggagatcgatcgcctgaacgaggtggccaagaacttaaacgaatctctgatcgacctgcaggagctgggcaagtacgagcagtatattaagtggccctggtatatctggttaggctttatcgccggcctgatcgccattgttatggtgaccatcatgctgtgctgcatgacctcctgctgttcctgtttaaaaggctgctgctcctgcggatcctgctgtaaattcgacgaagacgactccgagcccgtgctgaaaggagttaagttacactatacctaaatgagaccata

SEQ ID NO: 151 - RNA, 4588 nt, synthetic construct
  source 1..4588: mol_type = other RNA
ataggtctcacacattaaaacagcctgtgggttgatcccacccacaggcccattgggcgctagcactctggtatcacggtacctttgtgcgcctgttttataccccctcccccaactgtaacttagaagtaacacacaccgatcaacagtcagcgtggcacaccagccacgttttgatcaagcacttctgttaccccggactgagtatcaatagactgctcacgcggttgaaggagaaagcgttcgttatccggccaactacttcgaaaaacctagtaacaccgtggaagttgcagagtgtttcgctcagcactaccccagtgtagatcaggtcgatgagtcaccgcattccccacgggcgaccgtggcggtggctgcgttggcggcctgcccatggggaaacccatgggacgctctaatacagacatggtgcgaagagtctattgagctagttggtagtcctccggcccctgaatgcggctaatcctaactgcggagcacacaccctcaagccagagggcagtgtgtcgtaacgggcaactctgcagcggaaccgactactttgggtgtccgtgtttcattttattcctatactggctgcttatggtgacaattgagagatcgttaccatatagctattggattggccatccggtgactaatagagctattatatatccctttgttgggtttataccacttagcttgaaagaggttaaaacattacaattcattgttaagttgaatacagcaacatgttcgtgttcctggtgctgctgcccctggtgtcctcccagtgcgtcaacctgaccacccggacccaactgccccctgcctataccaattccttcacccggggcgtctactaccccgacaaggtgttccggtcctctgtgctccactccacccaggacctcttcctcccctttttctccaacgtgacctggttccacgccatccacgtgtctggcacaaacggaaccaagcgcttcgacaaccctgtgctccccttcaacgacggcgtgtacttcgcctccaccgagaagtccaacatcatccgcggctggatcttcggcaccaccctcgactctaagacccagtccctgctgattgtgaataacgccaccaacgtggtgatcaaggtgtgcgaatttcagttctgcaacgaccccttcctgggcgtttactaccataagaacaacaagtcctggatggagtccgagttccgggtgtattcctctgccaataactgcacctttgagtacgtgtcccagcccttcctgatggacctggagggcaagcagggcaattttaaaaacctgcgcgagttcgtgttcaagaacatcgacggctacttcaagatctattccaagcacacccctatcaacctggtgcgcgacctgccccagggcttttccgctctggagcccctggttgacctgcccatcggcatcaacatcacccgcttccagactttactggccctgcaccgctcctacctgacccccggcgattcctcttctggctggacagccggagccgctgcctactacgtgggatacctgcagccccgcaccttcctgctgaagtacaacgagaacggaaccattacagacgctgtcgactgtgctctggatcccctgtccgaaacaaagtgcaccctgaagtccttcaccgtggagaagggcatctaccagacctccaacttccgcgtgcagcccaccgagtccatcgtgagattccccaacatcactaacctgtgccccttcggcgaggtgttcaacgccacccgcttcgcctccgtgtacgcctggaaccgcaagcgcatctccaactgcgttgccgactactctgtgctctacaactccgcctccttctccaccttcaagtgctacggcgtgtcccccaccaagctgaacgacctgtgcttcaccaacgtgtacgccgactccttcgtgatccgcggcgacgaggtgcgccagatcgcccccggccagaccggaaagatcgccgattacaattacaagctgcccgacgacttcaccggctgcgtgatcgcctggaactccaacaatctggactccaaggttggcggcaactacaactacctgtaccgcctgttccgcaagtccaacctgaagcccttcgagcgggacatttccacagagatttaccaggctggctccaccccctgtaacggagtggagggcttcaactgctacttccccctgcagtcctacggcttccagcccaccaacggcgtgggctaccagccctaccgcgtggtggtgctgtccttcgagctgctgcacgcccctgccaccgtgtgcggccccaagaagtccaccaacctggtgaagaacaagtgcgtgaacttcaacttcaacggactgacaggcaccggcgtgctgaccgagtccaacaagaagttcctgcccttccagcagttcggccgggacattgccgacaccaccgacgccgtgcgcgacccccagaccctggagatcctggacatcaccccctgctccttcggcggagtgtccgtgatcacccccggcaccaacacctccaaccaggttgccgtgctgtaccaggacgttaactgcaccgaggtgcccgtggccatccacgccgaccagctgacccccacctggcgcgtgtactccaccggctccaacgtgttccagacccgcgccggctgcctgatcggcgccgagcacgtgaacaactcctacgagtgcgacatccccattggcgccggcatctgcgcctcctaccagacccagaccaactcccctcgccgcgcccggtccgtcgcctcccagtccatcatcgcctacaccatgtccctgggcgccgagaactccgtggcctactccaacaactccattgccatccccaccaacttcaccatctccgtgaccaccgaaatcctccccgtgtccatgaccaagacctccgtggactgcaccatgtacatctgcggcgactccaccgagtgctccaacctgctgctgcagtacggctccttctgcacccagctgaatcgcgccctgaccggcatcgccgtggagcaggacaagaacacccaagaggtgttcgcccaggtgaagcagatctacaagacacctcccatcaaggacttcggcggcttcaacttctcccagatcctgcccgacccctccaagccctccaagcgctccttcatcgaggacctgctgttcaacaaggtgaccctggccgacgccggcttcatcaagcagtacggcgactgtctgggagacattgccgcccgcgacctgatctgcgcccagaagttcaacggcttaaccgtgctgccccctctgctgaccgacgagatgatcgcccagtacacatccgctctgctggccggcaccatcacctccggctggacctttggcgctggcgctgccctgcagatccccttcgctatgcagatggcctaccgcttcaacggcatcggcgtgacccagaacgtgctgtacgagaaccagaagctgatcgccaaccagttcaactccgccatcggcaagatccaggactccctgtcctccaccgcctccgccctgggcaagctgcaggacgtggtgaaccagaacgcccaggccctgaacaccctggtgaagcagctgtcctctaacttcggcgccatctcctccgtgctgaacgacattctgtcccgcctggatcctcctgaggccgaggtgcaaatcgatcgcctcatcaccggccgcctgcagtccctgcagacctacgtgacacagcagctgatccgcgccgccgagatccgcgcctccgccaacctggccgccaccaagatgtctgagtgcgtgctgggccagtccaaacgcgttgacttctgcggcaagggctaccacctgatgtccttcccccagtccgccccccacggcgtggtgttcctgcacgtgacctacgtgcccgcccaggagaagaacttcactaccgcccccgccatctgccacgacggcaaggcccacttcccccgcgagggcgtgttcgtgtccaacggcacccactggttcgtgacccagcgcaacttctacgagccccagatcatcaccaccgacaacaccttcgtgtccggcaactgcgacgtggtgattggcatcgtgaacaacaccgtgtacgaccccctgcagcccgagctggactccttcaaggaggagctggacaagtactttaagaaccacacctcccccgacgtggacctgggcgacatctccggcatcaacgcctccgtggtgaacatccagaaggagatcgaccgcctgaacgaggtggccaagaacctgaacgagtccctgatcgacctgcaggagctgggcaagtacgaacagtacatcaagtggccctggtacatctggctgggcttcatcgccggcctgatcgccatcgtgatggtgaccatcatgctgtgctgcatgacctcttgctgttcctgtctgaagggctgctgctcctgcggctcctgctgcaagttcgacgaggacgactccgagcccgtgctgaagggcgtgaagctgcactacacctaaatgagaccata

SEQ ID NO: 152 - RNA, 4588 nt, synthetic construct
  source 1..4588: mol_type = other RNA
ataggtctcacacattaaaacagcctgtgggttgatcccacccacaggcccattgggcgctagcactctggtatcacggtacctttgtgcgcctgttttataccccctcccccaactgtaacttagaagtaacacacaccgatcaacagtcagcgtggcacaccagccacgttttgatcaagcacttctgttaccccggactgagtatcaatagactgctcacgcggttgaaggagaaagcgttcgttatccggccaactacttcgaaaaacctagtaacaccgtggaagttgcagagtgtttcgctcagcactaccccagtgtagatcaggtcgatgagtcaccgcattccccacgggcgaccgtggcggtggctgcgttggcggcctgcccatggggaaacccatgggacgctctaatacagacatggtgcgaagagtctattgagctagttggtagtcctccggcccctgaatgcggctaatcctaactgcggagcacacaccctcaagccagagggcagtgtgtcgtaacgggcaactctgcagcggaaccgactactttgggtgtccgtgtttcattttattcctatactggctgcttatggtgacaattgagagatcgttaccatatagctattggattggccatccggtgactaatagagctattatatatccctttgttgggtttataccacttagcttgaaagaggttaaaacattacaattcattgttaagttgaatacagcaacatgttcgtgttcctggtgctgctccccctggtgagctcccagtgcgtcaacctgaccacacggacccagctgccccccgcctataccaacagcttcacccgcggcgtctactaccccgacaaggtgttccggagcagcgtgctgcacagcacccaggacctcttcctccccttttttagcaacgtgacctggttccacgccatccacgtgagtggcaccaacggcaccaagcggttcgacaaccctgtgctccccttcaacgacggcgtgtacttcgctagcacagaaaaaagtaacatcattcggggctggatcttcggcaccacactggatagcaaaacccagagcctgctgattgtgaataacgccaccaacgtggtgatcaaggtgtgcgagttccagttctgcaacgaccccttcctgggcgtgtactaccacaagaacaacaagagctggatggagagcgagttccgcgtgtatagctctgccaacaactgcaccttcgagtacgtgagccagcccttcctgatggacctggagggcaagcagggcaatttcaaaaacctgcgggagttcgtgttcaagaacatcgacggctacttcaagatctacagcaagcacacccccatcaacctggtgcgggacctgccccagggctttagcgctctggagcccctggtggacctgcccatcggcatcaacatcacccgcttccaaaccctgttggccctgcaccggagctacctgacccctggcgatagcagtagtggctggacagccggagccgccgcctactacgtgggatacctgcagccccggaccttcctgctgaagtacaacgagaacggcacaatcacagacgccgtggactgcgccctggaccccctgagcgaaacaaagtgcaccctcaaaagtttcaccgtggagaagggcatctaccagaccagcaacttccgggtgcagcccaccgagagcatcgtgcggttccccaacatcaccaacctgtgccccttcggcgaggtgttcaacgccacccggttcgccagcgtgtacgcctggaaccggaagcggatcagcaactgcgtggccgactacagcgtgctgtataacagtgccagcttcagcaccttcaagtgctacggcgtgagccccaccaagctgaacgacctgtgcttcaccaacgtgtacgccgacagcttcgtgatccggggcgacgaggtgcggcagatcgcccccggccagaccggcaagatcgccgattacaattacaagctgcccgacgatttcaccggctgcgtgatcgcctggaacagcaacaacctggacagcaaggtgggcggcaactacaactacctgtaccggctgttccgcaaaagtaacctgaagcccttcgagcgggacatcagcaccgagatctaccaggccggcagtaccccttgcaacggcgtcgagggcttcaactgctacttccccctgcagagctacggcttccagcccaccaacggcgtgggctaccagccctaccgggtggtggttctgagcttcgagctgctgcacgcccctgccaccgtgtgcggccccaagaaaagcaccaacctggtgaagaacaagtgcgtgaatttcaattttaacggactcaccggaaccggcgtgctgaccgagagcaacaagaagttcctgcccttccagcaattcggccgggatattgccgacaccactgacgccgtgcgggacccccagaccctggagatcctggacatcacaccctgtagcttcggcggggtgagcgtgatcacccccggcaccaacaccagcaaccaggtggccgtgctgtaccaggacgtgaactgcaccgaggtgcccgtggccatccacgccgaccagctgacccccacctggcgggtgtacagcaccggcagcaacgtgttccagacccgggccggctgcctgatcggcgccgagcacgtgaataacagctacgagtgcgacatccccatcggagccggaatctgcgccagctaccagacccagaccaacagcccccggagagcccggagcgtggccagccagagcattattgcctacaccatgagcctgggcgccgagaacagcgtggcctacagcaacaatagtattgccatccccaccaacttcaccatcagcgtgaccaccgaaatcctccccgtgagcatgaccaagaccagcgtggactgcaccatgtacatctgcggcgacagcaccgagtgcagcaacctgctcctgcagtacggcagcttctgcacccagctgaaccgggccctgaccggaattgccgtggagcaggacaagaacacccaggaggtgttcgcccaggtgaagcagatctacaagacacctcccatcaaggacttcggcggcttcaacttcagccagatcctgcccgaccccagcaagcccagcaagcggagcttcatcgaggacctgttgttcaacaaggtgaccctggccgacgccggcttcatcaagcagtacggcgactgtctgggagatattgccgcacgggacctgatctgcgcccagaagttcaacggcctgaccgtgctgcccccactgctgaccgacgagatgatcgcccagtacacaagcgctctgctcgccggcaccatcaccagcggctggaccttcggcgccggcgctgccctgcagatccccttcgccatgcagatggcctaccggttcaacggcatcggcgtgacccagaacgtgctgtacgagaaccagaagctgatcgccaaccagttcaacagcgccatcggcaagatccaggacagcctgagctccaccgccagcgccctgggcaagctgcaggacgtggtgaaccagaacgcccaggccctgaacaccctggtgaagcagctgagcagcaacttcggcgccatcagctctgtgctgaacgacatcctgagccggctggatcctcctgaggccgaggtgcaaatcgatcggctcatcaccggccggctgcagagcctgcagacctacgtgacacagcagctgatccgggccgccgagatccgggccagcgccaacctggccgctaccaagatgagcgagtgcgtgctgggccagagcaagcgggtggacttctgcggcaagggctaccacctgatgagcttcccccagagcgccccccacggcgtggtgttcctgcacgtgacctacgtgcccgcccaggagaagaacttcaccaccgcccccgccatctgccacgacggcaaggcccacttcccccgggagggcgtgttcgtgagcaacggcacccactggttcgtgacccagcggaacttctacgagccccagatcataaccacagacaacaccttcgtgagcggcaactgcgacgtggtcatcggcatcgtgaacaacaccgtgtacgaccccctgcagcccgagctggacagcttcaaggaggaactggacaagtacttcaagaaccacaccagccccgacgtggacctgggcgacatcagcggcatcaacgccagcgtggtgaacatccagaaggagatcgaccggctgaacgaggtggccaagaacctgaacgagagcctgatcgacctgcaggagctgggcaagtacgagcagtacatcaagtggccctggtacatctggctgggctttattgccggcctgatcgccatcgtgatggtgaccatcatgctgtgctgtatgacaagctgttgcagttgcctgaagggctgctgcagctgcggcagctgctgcaagttcgacgaggacgacagcgagcccgtgctgaagggcgtgaagctgcactacacctaaatgagaccata

SEQ ID NO: 153 - RNA, 4057 nt, synthetic construct
  source 1..4057: mol_type = other RNA
ataggtctcacacactagggcgcgccagtcctcaagctgggcctgacacaactgtgttcactagcaactactcccagacaccatggtactcccgactcctgaggtactccctgccgttactgccctgtggggcaaggtgatactccctgaagttggtggtgaggccctgggcaggctactcccggtctacccttggacccagaggtcgactcggaccggccaccatgtttgttttcttagttttattacctttagtttcttcccagtgtgttaatttaactactagaactcaattacctcctgcttatactaattcttttactagaggagtgtattatcctgataaggtttttagatcttctgttctgcactctactcaggatttgttcttgcccttcttctctaacgtgacctggttccacgctattcacgtttctggaaccaacggcactaagagatttgataatcccgttttgccttttaacgacggagtttatttcgcctctaccgaaaaatctaacatcattaggggctggatctttggaactaccctggattctaaaactcaatctttattgattgtgaataacgctaccaacgttgtgattaaagtttgtgaatttcaattttgtaacgatccttttctgggagtttattatcataaaaacaataaatcttggatggaatctgaattccgcgtttattcttctgccaataactgtacctttgagtacgtttctcaacctttcttaatggatttagaaggaaaacaaggcaatttcaaaaacttaagagaatttgtttttaaaaatattgacggatattttaaaatttattctaagcatactcctattaatttagtgagagacttaccccaaggattttctgctttagaacctttagttgacttacctattggaatcaatatcactagatttcaaactttattagctttacatagatcttatttaactcctggagattcttcctccggctggacagccggagccgctgcttattacgttggatatttacagcctagaacttttctgctgaaatataacgaaaacggaaccattaccgacgccgttgactgtgctctggatcctttatctgaaaccaagtgtactttaaaatcttttaccgttgaaaaaggaatttatcaaacttctaattttagagttcaacctactgaatctatcgttagattccctaatattactaatttgtgtccctttggagaggttttcaacgctactagatttgcctctgtttacgcttggaatcgcaagagaatttctaattgtgtggccgattactccgttttgtataactctgcttctttctctacttttaagtgttacggagtttcccctactaaactgaacgatttgtgttttactaacgtttacgctgattcttttgttattagaggcgacgaagttagacaaattgctcctggacaaactggaaagattgctgactataactataaactgcctgacgattttaccggctgtgttattgcttggaattctaataatttagattctaaagttggaggaaattataattatttatatagattatttagaaaatctaatttaaaaccttttgaaagagatatttccactgagatttaccaggctggatctactccttgtaacggcgttgagggatttaattgttattttcctttacaatcttacggatttcaacctaccaacggagttggatatcaaccttacagagttgtggtgctgtcttttgaattattacacgctcccgctactgtttgcggccctaaaaagtctactaatctggttaagaataagtgtgtgaattttaatttcaacggattgaccggaactggagttctgactgaatctaataaaaaatttttaccctttcaacaatttggaagggatatcgctgatactactgacgctgttagagatcctcaaactttagaaatcctggatattactccttgttcttttggaggagtttccgttattactcctggcactaatacttctaatcaagttgctgttttatatcaagacgttaattgcaccgaagttcctgttgctattcacgctgatcagttaactcctacttggagagtttattctactggatctaacgtttttcaaaccagagctggctgtttaatcggagctgaacacgtgaataattcttacgagtgcgatattcccatcggagctggaatttgtgcctcttatcaaactcaaaccaattctcctaggagggctagatccgttgcctctcaatctattattgcttataccatgtctttaggagctgaaaattccgttgcttactctaacaattctattgctattcctactaactttactatttctgttactactgaaattctgcccgtgtccatgactaaaacttctgttgattgtactatgtatatttgtggagattccactgagtgttctaacctgttattacaatacggatctttttgtactcaattaaatagagctctgactggaattgctgttgaacaggacaaaaatactcaagaagtttttgcccaagttaaacagatttataaaactcctcctattaaagattttggaggatttaatttctctcaaattttacctgacccttctaagccttccaaaaggtctttcatcgaagatttattatttaataaagttaccttagccgacgctggatttattaagcaatacggagattgcttaggcgatatcgctgctagagacttaatttgtgctcaaaaatttaacggattaactgttttacctcccctgttaactgacgaaatgatcgctcaatatacttctgctctgttagctggaactattacttctggctggacttttggagctggagctgctttacaaattccctttgctatgcagatggcttatagatttaacggaattggagttactcaaaacgttttatacgaaaatcaaaaattaattgctaatcaatttaattctgctattggaaaaattcaagattccctgtcttctactgcttccgctctgggaaaattacaagacgttgttaatcaaaacgctcaagctttgaataccttagttaaacaattatcttccaattttggagctatttcttctgttttaaacgacattttatctagattagatccccctgaagctgaagttcagattgacagattgattaccggaagattacaatctttacaaacttacgttactcaacaactgattagagctgctgaaattagagcctctgctaatttagctgctactaagatgtctgagtgtgttttaggacagtccaaaagagttgatttttgtggaaaaggctatcatctgatgtcttttcctcaatctgctcctcacggagttgtgtttttacacgttacttacgttcctgctcaagagaagaattttactactgctcctgctatttgtcacgacggaaaagctcattttcctagagaaggagtttttgtttctaacggaactcattggtttgttactcaaagaaacttttacgaacctcagattattaccactgataatacctttgtttctggcaattgtgacgtggttattggaattgttaataatactgtttacgatcctttacaacccgaactggattcttttaaagaagaattagataaatactttaaaaatcatacttctcccgacgttgatttaggagatatctctggaattaacgcttctgttgtgaatattcaaaaggaaattgatagattaaacgaagtggctaaaaatttaaacgagtctttaattgatttacaggaactgggaaaatacgaacaatatattaagtggccttggtacatttggttaggctttattgctggactgattgctattgtgatggttactatcatgttgtgttgcatgacttcttgttgttcctgtttaaaaggctgttgctcttgtggatcttgttgcaaatttgacgaagacgattctgaacctgttctgaaaggagttaaactgcattatacttaaatgagaccata

SEQ ID NO: 154 - RNA, 4057 nt, synthetic construct
  source 1..4057: mol_type = other RNA
ataggtctcacacactagggcgcgccagtcctcaagctgggcctgacacaactgtgttcactagcaactactcccagacaccatggtactcccgactcctgaggtactccctgccgttactgccctgtggggcaaggtgatactccctgaagttggtggtgaggccctgggcaggctactcccggtctacccttggacccagaggtcgactcggaccggccaccatgttcgtgttcttagtgctgttacccctggtttcttctcagtgtgtcaatttaaccaccagaacccaactgcctcctgcctatactaattcctttacccgcggagtttactatcccgataaggtttttcgctcctctgttttacactctactcaggacttattcttacccttcttctccaacgttacttggtttcacgccattcacgtttctggaaccaacggaactaagagattcgataatcctgtgttacctttcaacgacggagtttattttgcttccactgaaaaatccaatatcattaggggctggatctttggaaccactttagattccaagactcaatctttattaattgtgaataacgccaccaacgtggttatcaaagtgtgtgaattccaattttgtaacgaccctttcttaggcgtgtattatcacaaaaataataaatcttggatggaatctgaatttcgcgtttactcttccgctaacaactgcacttttgagtacgtttcccagccttttctgatggatctggaaggcaaacagggaaattttaaaaatctgagagaatttgtttttaagaacattgacggatatttcaagatctattctaaacacactcccatcaatttggttagagatttacctcagggcttttctgctttagaacctttagttgacctgcctattggaatcaacattactagatttcaaactctgttagctctgcatagatcttatttaactcctggagattcctcctccggctggaccgccggagctgctgcttattacgttggctatttacaacccagaacttttctgttaaaatataacgaaaacggcaccatcactgacgccgtggattgtgctttagatcccttatccgaaactaagtgtactctgaaatccttcactgttgaaaaaggaatttatcagacctctaattttagagtgcaacctaccgaatctattgttagatttcctaatattaccaacttgtgcccttttggcgaagttttcaacgctactagatttgcttctgtttacgcttggaatagaaaaagaatttctaactgtgtggctgactattccgtgttatacaattctgcctctttttctacttttaagtgttacggagtgtctcccactaaactgaacgatttgtgctttaccaacgtttacgctgattcttttgttattagaggcgacgaggttcgccagattgcccctggccagactggcaaaattgctgactataactataaattacctgacgattttaccggctgcgttatcgcttggaactctaataatctggattctaaagttggaggaaactacaattatttatatagattatttagaaaatctaatttaaaacccttcgagagggatatctctactgaaatctaccaagctggatctactccttgcaacggcgttgaaggatttaattgttattttcctttacaatcttacggattccaacctactaacggagttggatatcagccttatagagtggtggttttatctttcgaattattacacgctcccgctactgtgtgtggacccaaaaagtctactaatttagttaaaaataagtgtgttaatttcaattttaacggactcactggcactggagtgttaactgaatctaataaaaagttcttacctttccaacagttcggacgcgacattgccgacaccactgacgctgtgagagatcctcaaaccttagagattctggatattaccccttgttcctttggaggcgtttccgttatcactcccggaactaacacttctaatcaggttgccgttttatatcaggacgttaattgcactgaagttcctgttgctattcacgctgatcaactgactcctacttggagagtttattccactggatctaacgtttttcagactcgcgccggctgtttaattggagctgaacacgtgaacaactcctacgagtgcgatattcctattggcgctggcatctgtgcttcttatcaaactcaaactaattctcccaggagggctcgctctgttgcttcccaatctatcattgcttatactatgtccttaggcgctgaaaattctgttgcttattccaacaattctattgctattcccaccaattttactatttctgtgactactgaaattttacctgtttccatgactaagacttctgttgattgtactatgtatatctgcggagattctactgagtgttccaacctcttattacagtacggatctttttgcactcagttaaatagagctctgactggaatcgctgttgaacaagacaaaaacacccaagaagtgtttgctcaggtgaagcaaatttacaagacacctcctattaaggattttggaggattcaatttttcccagattttacctgatccttctaaaccttctaaacgctcctttattgaagatttactgttcaataaagtgactctggctgacgctggcttcatcaagcaatacggcgattgtttaggagacatcgctgctagagacttaatttgtgctcaaaaattcaacggactgactgttctgccccctttactgaccgacgagatgatcgcccaatatacttctgccctgttagctggcaccattacttctggctggacctttggagctggcgctgctttacaaattcctttcgccatgcagatggcttatcgctttaacggaattggcgttacccaaaacgtgttatacgagaatcaaaaattaatcgccaatcaatttaattctgctattggcaagattcaagattctttatcttctactgcttccgccctgggcaaactgcaggacgttgttaaccagaacgctcaagccctgaacactttagtgaagcaactgtcttctaacttcggcgctatttcttccgttttaaacgacattctgtctcgcttagatccccctgaggctgaggttcaaattgatagactgattactggaagattacagtccctgcaaacttacgttactcaacagttaatcagagctgctgaaatccgcgcttccgctaatttagctgctactaaaatgtctgagtgtgtgttaggccagtctaagagagttgacttttgtggcaagggctatcatttaatgtcttttcctcagtccgctcctcacggcgttgtgttcttacacgtgacttacgttcccgcccaagagaaaaattttaccactgctcctgctatttgtcacgacggaaaagctcattttcctagagaaggagtgtttgtttctaacggaacccactggtttgtgactcaaagaaacttttacgaaccccaaattattactactgacaatactttcgtttccggcaactgtgacgtggtgatcggaattgttaataacaccgtttacgatcccttacaacctgaattagattcttttaaagaagaattagataaatatttcaaaaatcatacttcccctgacgttgatctgggagatatttctggaattaacgcttctgtggtgaacattcaaaaagagattgacagattaaacgaagttgctaaaaacctgaacgagtccctgatcgacctgcaggaactgggaaaatacgagcagtatattaagtggccttggtatatttggttaggatttattgctggattaattgctattgtgatggtgaccattatgttgtgctgtatgacctcttgttgttcttgcctgaagggctgctgttcttgtggctcttgttgcaagtttgacgaagacgattccgaacccgttttaaagggagtgaaactgcattatacttaaatgagaccata

SEQ ID NO: 155 - RNA, 4057 nt, synthetic construct
  source 1..4057: mol_type = other RNA
ataggtctcacacactagggcgcgccagtcctcaagctgggcctgacacaactgtgttcactagcaactactcccagacaccatggtactcccgactcctgaggtactccctgccgttactgccctgtggggcaaggtgatactccctgaagttggtggtgaggccctgggcaggctactcccggtctacccttggacccagaggtcgactcggaccggccaccatgtttgtttttctggttttattacccttagtgtcctcccagtgcgtgaacttaactacccgcactcagctgcctcctgcctataccaactctttcactagaggcgtttactatcctgacaaagtttttagatcttctgtgctgcattccactcaagatttattcctgcccttcttttctaacgttacttggtttcacgccatccacgtgtctggcaccaacggaaccaaacgctttgacaaccctgtgttaccttttaacgacggagtttacttcgcctccactgaaaagtccaatattatccggggctggattttcggaaccaccttagattctaaaacccagtctctgctgattgtgaacaacgccactaacgtggttattaaagtgtgcgagtttcaattttgcaacgacccttttctgggagtttattaccacaaaaataacaaatcttggatggagtctgaatttagagtgtattcttccgccaataattgcaccttcgagtacgtttcccaaccctttctgatggacttagaaggaaagcaaggcaatttcaaaaacctgcgcgaatttgtgttcaaaaatattgacggctatttcaaaatttactccaagcatacccctattaatttagtgcgcgatctgcctcagggcttctctgccttagagcctttagtggacctgcctattggcattaatattactcgctttcagactttactggccctgcatagatcttatttaactcctggagactcttcttccggctggaccgctggagccgctgcctactacgttggctatctgcagcctagaacttttttattaaagtacaacgaaaacggaaccatcactgacgctgttgattgcgccctggatcctttatctgaaacaaagtgcaccctgaagtccttcaccgttgaaaagggcatttaccaaacatccaattttagggttcagcctactgaatccatcgtgcgctttcccaacatcactaacttgtgtccctttggcgaggtgtttaacgccactcgctttgcctctgtgtacgcctggaacagaaagagaatttccaattgcgtggctgattattctgtgctgtataactccgcttctttctccacctttaagtgttacggagtgtcccctactaaactgaacgacttgtgcttcaccaacgtttacgccgattcttttgtgattcgcggcgacgaagttagacaaatcgcccccggacagaccggaaagatcgctgattacaactataagttacctgacgacttcaccggctgcgtgattgcttggaattctaataacttagactctaaagttggaggcaactacaattacctgtatagattattccgcaaatctaacctgaaaccttttgagagagacatctccaccgaaatttaccaagccggctctaccccctgcaacggagttgaaggatttaattgctactttcccctgcagtcctacggattccaacctactaacggcgttggataccaaccttacagagttgtggtgctgtcttttgaattattacacgcccctgccaccgtttgtggccctaagaaatctaccaatctggttaaaaacaagtgtgtgaattttaattttaacggcctgaccggcactggcgttttaaccgagtctaacaagaagtttctgcctttccaacaatttggcagagacatcgccgacaccaccgacgctgtgcgcgatcctcaaaccttagaaattttagatattactccttgctctttcggcggcgtttccgttattactcctggaaccaatacctctaatcaagtggctgtgctgtaccaggacgttaattgcactgaagtgcctgtggctattcacgccgatcaactgacccccacttggagagtttattctactggatctaacgtgttccaaactagagctggctgtctgatcggcgccgagcacgttaataattcttacgagtgtgatatccctattggcgctggcatttgcgcctcttaccagacccagaccaactccccccgcagagctagatccgtggcctctcagtccattattgcctatactatgtccttaggagccgaaaattctgtggcttactccaacaattctattgccattcccactaattttactatctctgtgactaccgaaatcctgcccgtgtccatgactaagacctccgtggactgcaccatgtatatctgcggagactctactgagtgttccaacttattactgcagtacggctctttctgtactcagctgaatagagccctgactggaattgctgtggagcaagacaaaaatacccaggaggtgttcgctcaggtgaaacaaatttataagacccctcccatcaaagattttggaggcttcaatttttctcaaattctgcccgacccctccaagccttccaaaagatcctttattgaagatctgctgttcaataaggttactttagccgacgccggcttcattaagcagtacggagattgtctgggcgatattgctgcccgcgacctgatttgcgctcagaagttcaacggattaaccgttctgcctcctctgctgactgacgagatgattgctcagtatacttctgccctgctggctggaactattacctctggctggaccttcggcgccggagctgctctgcaaattcccttcgccatgcaaatggcttacagatttaacggcatcggagttactcaaaacgtgctgtacgaaaaccaaaaattaattgccaaccagttcaattccgctatcggcaaaattcaggattctctgtcttctactgcttccgctttaggcaaactgcaagacgttgttaaccagaacgcccaagctttaaacaccctggttaagcagctgtcctctaattttggcgctatctcttctgttctgaacgacattttatctagactggacccccctgaagccgaggtgcagattgatagattaatcaccggaagactgcaatccctgcagacctacgttacccagcaattaatcagagccgccgagatcagagcctctgccaacttagctgccaccaaaatgtccgagtgtgtgctgggacagtccaagcgcgtggacttctgtggaaagggataccacctgatgtcttttcctcaatctgctccccacggagttgtgtttctgcacgttacttacgtgcctgcccaagagaaaaactttactaccgcccccgctatttgccacgacggcaaggctcacttccctagagaaggagtttttgtgtctaacggaacccattggtttgtgactcaaagaaatttttacgagcctcaaatcattaccaccgataacacttttgtttccggcaattgtgacgtggtgattggaatcgttaacaacaccgtttacgaccctttacagcccgaattagactcttttaaagaggagttagataaatattttaaaaaccatacctctcccgacgtggacctgggagatatttccggaattaacgcttctgttgtgaatatccagaaagagatcgacagattaaacgaggttgctaaaaatttaaacgaatccctgattgacctgcaggagctgggcaaatacgaacaatatattaagtggccttggtatatttggttaggcttcatcgctggattaatcgctattgttatggtgactattatgttgtgttgtatgacttcctgctgttcttgcttaaaaggctgctgttcctgcggatcctgttgtaaattcgacgaggacgattccgagcctgttttaaaaggagtgaaattacattatacttaaatgagaccata

SEQ ID NO: 156 - RNA, 4057 nt, synthetic construct
  source 1..4057: mol_type = other RNA
ataggtctcacacactagggcgcgccagtcctcaagctgggcctgacacaactgtgttcactagcaactactcccagacaccatggtactcccgactcctgaggtactccctgccgttactgccctgtggggcaaggtgatactccctgaagttggtggtgaggccctgggcaggctactcccggtctacccttggacccagaggtcgactcggaccggccaccatgttcgtgttcctggtgctgctgcccttagtgtcctcccagtgtgtgaacctgaccaccagaacccagttacctcccgcttacaccaactcctttacccgcggagtgtactaccctgataaggtttttagatcctccgttctgcattctacccaagacctgtttttacccttcttttccaacgtgacctggttccacgctatccacgtgtccggcactaacggcactaagcgcttcgacaatcctgtgctcccttttaacgacggcgtgtacttcgcttctaccgaaaaatccaacatcatccgcggctggatcttcggaactaccctggattctaaaacccagtctttattaatcgtgaataacgccaccaacgtggttattaaggtctgtgagttccaattttgcaacgaccctttcttaggcgtttattaccacaaaaacaataagtcttggatggagtccgaattccgcgtgtactcctctgccaacaattgcacctttgagtacgtgtcccagcccttcctgatggacctggaaggcaagcagggcaattttaaaaatctgcgcgaattcgttttcaagaacatcgacggctactttaagatttattccaaacatacccccatcaacctggtgcgcgatttaccccagggcttctccgccttagagcccttagtggatctgcctatcggcatcaatatcacccgctttcagactctgctggccctgcacagatcctacctgactcccggagactcttcttctggctggaccgccggagctgccgcctactacgtgggctacctgcaaccccgcacctttctgctgaagtacaacgaaaacggcaccatcacagacgccgttgactgcgctctggaccccctgtctgagactaagtgcaccctgaagtccttcactgtggagaaaggaatctaccagacctccaacttccgcgtgcagcctaccgaatccattgttcgcttccctaacattactaatctgtgccccttcggagaagttttcaacgccactagattcgcttccgtgtacgcctggaatcgcaagcgcatctccaattgcgttgctgactactctgtgttatacaattccgcctctttttccactttcaagtgctacggcgtgtctcctaccaagctgaacgacctgtgtttcactaacgtgtacgctgattcctttgttatccgcggcgacgaggtgagacagatcgcccctggccagaccggaaaaatcgccgactacaactacaagttacccgacgattttaccggctgtgttattgcttggaactctaataatctggactctaaagtgggcggcaattacaactacttatatcgcctgttcagaaaatccaacctgaaacccttcgaacgggacatttccaccgaaatttatcaggccggctccaccccctgcaacggagtggagggcttcaattgctacttccccctgcaatcctacggctttcagcccaccaacggcgtgggataccagccctaccgcgttgttgtgttatcctttgaactgctgcacgctcctgctactgtgtgcggacctaaaaaatccaccaatctggtgaagaacaagtgtgtgaattttaattttaacggcctgaccggcaccggagtgctgaccgagtccaacaaaaagtttctgccctttcagcagttcggccgggacattgccgacactaccgacgctgtgagggatcctcagaccctggagattctggacattaccccttgctccttcggaggagtttccgtgatcacccctggcaccaatacttctaaccaagtggctgttttataccaggacgtgaattgtactgaggtgcctgtggccatccacgccgatcaattaactcccacctggagagtgtattccaccggctctaacgttttccaaacccgcgctggctgcttaatcggcgctgagcacgtgaacaactcctacgagtgtgatattcctatcggagccggcatctgtgcttcctaccagactcagaccaactcccccagacgcgctaggtccgtggcttcccagtctattatcgcttatactatgtccctgggagccgagaattctgttgcctattccaataactccatcgccattcctaccaactttaccatctctgtgaccaccgagattctgcccgtgtccatgaccaaaacttctgtggattgtaccatgtacatctgtggagattccaccgagtgctctaacctgctgctgcagtacggctccttttgcacccaattaaaccgcgctctgactggcatcgccgtggagcaagataaaaacacccaagaggtgttcgctcaggtgaagcagatctacaagacacctcccattaaagatttcggaggctttaatttctctcagatcctgcccgacccttctaagccctctaaacgctccttcatcgaggatctgctgttcaacaaggttaccctggccgacgctggctttatcaaacagtacggcgactgcttaggcgacatcgccgcccgcgatttaatttgcgctcagaagttcaacggactgaccgtgctgcctcctctgctgaccgacgaaatgatcgcccaatacacctccgccctgctggctggcactatcacctccggctggacctttggcgctggagccgctctgcaaatccctttcgctatgcagatggcttaccgctttaacggaatcggcgtgacccagaacgtgttatacgaaaatcagaaattaattgccaatcaatttaactctgccatcggcaagattcaggattctctgtcttctactgcctctgccttaggaaaactgcaggacgtggtgaatcagaacgcccaggccctgaataccctggttaagcaactgtcttccaatttcggcgctatctcctctgtgttaaacgacattctgtcccgcctggatcctcctgaggccgaagtgcaaattgaccgcttaatcactggcagactgcaatccctgcaaacctacgttactcaacagctgatcagagccgccgaaatccgcgcttctgccaacttagctgctaccaagatgtccgagtgcgtgctgggacagtccaaaagagttgacttttgcggaaagggctaccacctgatgtcctttccccagtccgccccccacggagttgttttcctgcacgttacttacgttcctgctcaagagaagaacttcaccaccgctcccgctatttgccacgacggcaaggctcatttccccagagagggagtgtttgtgtccaacggcactcactggtttgttactcagcgcaacttctacgaacctcagatcatcaccactgacaatacctttgtgtccggaaactgtgacgtggttatcggcattgtgaacaatactgtgtacgaccctttacaacctgagctggattcttttaaagaagaactggacaagtacttcaagaaccacacctcccccgacgtggatctgggcgacatctccggcatcaacgcctctgtggtgaatattcagaaggagattgatcgcctgaacgaggttgccaagaatctgaacgagtctctgatcgacctgcaggagctgggcaagtacgaacagtacatcaagtggccctggtacatttggctgggctttattgctggactgatcgctatcgttatggttaccatcatgctgtgctgtatgacctcttgctgctcctgtctgaaaggctgttgctcctgcggctcctgttgtaagtttgacgaggacgactccgagcctgttctgaaaggagttaaactgcactacacctaaatgagaccata

SEQ ID NO: 157 - RNA, 4057 nt, synthetic construct
  source 1..4057: mol_type = other RNA
ataggtctcacacactagggcgcgccagtcctcaagctgggcctgacacaactgtgttcactagcaactactcccagacaccatggtactcccgactcctgaggtactccctgccgttactgccctgtggggcaaggtgatactccctgaagttggtggtgaggccctgggcaggctactcccggtctacccttggacccagaggtcgactcggaccggccaccatgtttgtgtttctggtgctgctgcctctggtgtcctctcagtgtgttaacctgaccaccagaacccaactgccccccgcctacactaactctttcactcgcggcgtgtactaccccgataaagttttcagatcctccgtgctccattctacccaagacctgttcttaccctttttctccaacgtgacctggttccacgccatccacgtgtccggcactaacggaaccaagcgcttcgataatcccgtgctgcctttcaacgacggagtttactttgcttccaccgagaagtccaatattatccggggctggatcttcggcaccacactggattccaaaacccagtccttactgattgtgaacaacgccactaacgtggtgatcaaggtgtgtgagttccagttctgtaacgacccctttctgggcgtgtattatcataaaaacaacaagtcctggatggagtccgagtttagagtgtattcttccgctaacaactgcaccttcgaatacgtgtcccagcctttcctgatggatctggaaggaaagcagggcaacttcaagaacttacgcgagttcgtgttcaagaacatcgacggctacttcaaaatttactccaagcacacccctatcaacttagtgagagatctgccccagggcttctccgctctggaacctctggtggacttacccattggcatcaacatcactcgcttccaaacactgctcgctctgcaccgctcttatctgacccccggcgactcctcttctggctggaccgccggcgccgctgcctattacgtgggatacctgcaaccccgcacctttctgctgaaatacaacgaaaacggcaccatcacagacgctgtggactgcgctctggaccccctgtccgagactaagtgcaccctgaagtccttcaccgttgaaaagggcatttatcagacttccaacttccgcgtgcagcctactgagtccattgtgcgcttccctaacatcactaacttgtgtcctttcggcgaagtgttcaacgctactcgcttcgcctccgtgtacgcctggaaccgcaagagaatctccaattgcgtggccgactactctgttctctacaactctgcctccttctccacctttaagtgctacggcgtgtcccccaccaaactgaacgacctgtgcttcaccaacgtgtacgccgactcctttgtgatcagaggcgacgaggtgcgccagatcgcccccggccagactggcaagatcgccgattacaattacaagctgcctgacgactttaccggctgcgtgattgcctggaactccaacaacctggactccaaagtgggcggcaactacaactacctgtaccgcctgtttagaaaatccaacctgaagcccttcgagcgggacatttctactgagatctaccaggccggctccaccccctgtaacggcgtggaaggcttcaactgctactttcccctgcagtcctacggcttccagcctaccaacggcgtgggctaccagccctaccgcgtggtggtgttatccttcgagctgctgcacgcccctgccaccgtgtgcggacccaaaaagtctactaacctggttaagaataagtgtgttaatttcaattttaacggcttaaccggaaccggagtgctgaccgagtccaataaaaagttcctgccctttcagcagtttggccgcgacatcgccgatactaccgacgccgtgcgcgatccccagaccctggagatcctggacattaccccctgctctttcggcggagtgtccgtgatcacccccggcaccaatacctccaatcaggtggccgttctgtaccaggacgtgaattgcaccgaagtgcccgtggccattcacgccgaccagttaactcctacttggagagtgtactccaccggctctaacgtgtttcagacccgcgccggctgtctgatcggcgccgagcacgtgaacaactcctacgagtgcgacattcccattggcgccggcatctgcgcctcctaccaaacccagactaactctcccagacgcgcccgctctgtggcctctcagtccatcatcgcttacactatgtccctgggcgccgagaactccgtggcctattccaacaactccatcgccatccccactaacttcaccatctctgtgaccaccgaaatcctccccgtgtctatgactaagacttccgtggactgtaccatgtacatttgcggcgactccaccgagtgttccaatctgctgctgcagtacggctccttttgcacccagctgaaccgcgccctgaccggcatcgctgttgagcaggacaagaatacccaggaggtgtttgctcaggtgaagcaaatctataagacccctcccatcaaggactttggcggcttcaacttttcccagatcctgcccgacccttccaagccctccaaacgctctttcatcgaagatctgctgttcaataaagtgaccctggccgacgccggcttcatcaagcagtacggagactgtctgggagacattgctgctcgcgacctgatttgcgcccagaagttcaacggcctgaccgtgctgccccctctgctgaccgacgagatgatcgctcagtacacctccgccctgctggctggcactatcacctccggctggactttcggcgctggcgccgccctgcagattcccttcgccatgcagatggcttatcgcttcaacggaatcggagtgacacagaacgtgctgtacgagaatcagaaactgatcgctaaccagtttaattccgccattggcaagatccaggactccctgtcctctactgcttccgccctgggcaagctgcaggacgtggtgaaccagaacgcccaggctctgaacaccctggtgaagcaactgtcttctaactttggagccatttcttccgtgctgaacgacatcctgtccagactggatcctcctgaggccgaggtgcagatcgaccgcctgatcactggccgcctgcagtccctgcagacttacgttacccagcaattaatccgcgctgccgagatccgcgcctccgccaacctggccgccaccaagatgtccgagtgcgttctgggccagtccaaacgcgttgacttctgcggcaagggctaccacctgatgtccttcccccagtccgctccccacggagtggtgttcctgcacgtgacctacgtgcctgcccaggagaagaacttcaccaccgcccccgccatttgccacgacggaaaggcccacttcccccgcgagggagtgttcgtttctaacggcactcactggttcgtgacccagagaaacttctacgagccccagattattaccaccgacaataccttcgtttctggcaactgcgacgtggttatcggcatcgtgaacaacaccgtgtacgaccccctgcaacccgagctggattctttcaaggaggagctggataagtactttaaaaaccatacctcccccgacgtggacctgggcgacatctctggcatcaacgcctccgtggtgaatatccagaaggagatcgatcgcctgaacgaggtggccaagaacttaaacgaatctctgatcgacctgcaggagctgggcaagtacgagcagtatattaagtggccctggtatatctggttaggctttatcgccggcctgatcgccattgttatggtgaccatcatgctgtgctgcatgacctcctgctgttcctgtttaaaaggctgctgctcctgcggatcctgctgtaaattcgacgaagacgactccgagcccgtgctgaaaggagttaagttacactatacctaaatgagaccata

SEQ ID NO: 158 - RNA, 4057 nt, synthetic construct
  source 1..4057: mol_type = other RNA
ataggtctcacacactagggcgcgccagtcctcaagctgggcctgacacaactgtgttcactagcaactactcccagacaccatggtactcccgactcctgaggtactccctgccgttactgccctgtggggcaaggtgatactccctgaagttggtggtgaggccctgggcaggctactcccggtctacccttggacccagaggtcgactcggaccggccaccatgttcgtgttcctggtgctgctgcccctggtgtcctcccagtgcgtcaacctgaccacccggacccaactgccccctgcctataccaattccttcacccggggcgtctactaccccgacaaggtgttccggtcctctgtgctccactccacccaggacctcttcctcccctttttctccaacgtgacctggttccacgccatccacgtgtctggcacaaacggaaccaagcgcttcgacaaccctgtgctccccttcaacgacggcgtgtacttcgcctccaccgagaagtccaacatcatccgcggctggatcttcggcaccaccctcgactctaagacccagtccctgctgattgtgaataacgccaccaacgtggtgatcaaggtgtgcgaatttcagttctgcaacgaccccttcctgggcgtttactaccataagaacaacaagtcctggatggagtccgagttccgggtgtattcctctgccaataactgcacctttgagtacgtgtcccagcccttcctgatggacctggagggcaagcagggcaattttaaaaacctgcgcgagttcgtgttcaagaacatcgacggctacttcaagatctattccaagcacacccctatcaacctggtgcgcgacctgccccagggcttttccgctctggagcccctggttgacctgcccatcggcatcaacatcacccgcttccagactttactggccctgcaccgctcctacctgacccccggcgattcctcttctggctggacagccggagccgctgcctactacgtgggatacctgcagccccgcaccttcctgctgaagtacaacgagaacggaaccattacagacgctgtcgactgtgctctggatcccctgtccgaaacaaagtgcaccctgaagtccttcaccgtggagaagggcatctaccagacctccaacttccgcgtgcagcccaccgagtccatcgtgagattccccaacatcactaacctgtgccccttcggcgaggtgttcaacgccacccgcttcgcctccgtgtacgcctggaaccgcaagcgcatctccaactgcgttgccgactactctgtgctctacaactccgcctccttctccaccttcaagtgctacggcgtgtcccccaccaagctgaacgacctgtgcttcaccaacgtgtacgccgactccttcgtgatccgcggcgacgaggtgcgccagatcgcccccggccagaccggaaagatcgccgattacaattacaagctgcccgacgacttcaccggctgcgtgatcgcctggaactccaacaatctggactccaaggttggcggcaactacaactacctgtaccgcctgttccgcaagtccaacctgaagcccttcgagcgggacatttccacagagatttaccaggctggctccaccccctgtaacggagtggagggcttcaactgctacttccccctgcagtcctacggcttccagcccaccaacggcgtgggctaccagccctaccgcgtggtggtgctgtccttcgagctgctgcacgcccctgccaccgtgtgcggccccaagaagtccaccaacctggtgaagaacaagtgcgtgaacttcaacttcaacggactgacaggcaccggcgtgctgaccgagtccaacaagaagttcctgcccttccagcagttcggccgggacattgccgacaccaccgacgccgtgcgcgacccccagaccctggagatcctggacatcaccccctgctccttcggcggagtgtccgtgatcacccccggcaccaacacctccaaccaggttgccgtgctgtaccaggacgttaactgcaccgaggtgcccgtggccatccacgccgaccagctgacccccacctggcgcgtgtactccaccggctccaacgtgttccagacccgcgccggctgcctgatcggcgccgagcacgtgaacaactcctacgagtgcgacatccccattggcgccggcatctgcgcctcctaccagacccagaccaactcccctcgccgcgcccggtccgtcgcctcccagtccatcatcgcctacaccatgtccctgggcgccgagaactccgtggcctactccaacaactccattgccatccccaccaacttcaccatctccgtgaccaccgaaatcctccccgtgtccatgaccaagacctccgtggactgcaccatgtacatctgcggcgactccaccgagtgctccaacctgctgctgcagtacggctccttctgcacccagctgaatcgcgccctgaccggcatcgccgtggagcaggacaagaacacccaagaggtgttcgcccaggtgaagcagatctacaagacacctcccatcaaggacttcggcggcttcaacttctcccagatcctgcccgacccctccaagccctccaagcgctccttcatcgaggacctgctgttcaacaaggtgaccctggccgacgccggcttcatcaagcagtacggcgactgtctgggagacattgccgcccgcgacctgatctgcgcccagaagttcaacggcttaaccgtgctgccccctctgctgaccgacgagatgatcgcccagtacacatccgctctgctggccggcaccatcacctccggctggacctttggcgctggcgctgccctgcagatccccttcgctatgcagatggcctaccgcttcaacggcatcggcgtgacccagaacgtgctgtacgagaaccagaagctgatcgccaaccagttcaactccgccatcggcaagatccaggactccctgtcctccaccgcctccgccctgggcaagctgcaggacgtggtgaaccagaacgcccaggccctgaacaccctggtgaagcagctgtcctctaacttcggcgccatctcctccgtgctgaacgacattctgtcccgcctggatcctcctgaggccgaggtgcaaatcgatcgcctcatcaccggccgcctgcagtccctgcagacctacgtgacacagcagctgatccgcgccgccgagatccgcgcctccgccaacctggccgccaccaagatgtctgagtgcgtgctgggccagtccaaacgcgttgacttctgcggcaagggctaccacctgatgtccttcccccagtccgccccccacggcgtggtgttcctgcacgtgacctacgtgcccgcccaggagaagaacttcactaccgcccccgccatctgccacgacggcaaggcccacttcccccgcgagggcgtgttcgtgtccaacggcacccactggttcgtgacccagcgcaacttctacgagccccagatcatcaccaccgacaacaccttcgtgtccggcaactgcgacgtggtgattggcatcgtgaacaacaccgtgtacgaccccctgcagcccgagctggactccttcaaggaggagctggacaagtactttaagaaccacacctcccccgacgtggacctgggcgacatctccggcatcaacgcctccgtggtgaacatccagaaggagatcgaccgcctgaacgaggtggccaagaacctgaacgagtccctgatcgacctgcaggagctgggcaagtacgaacagtacatcaagtggccctggtacatctggctgggcttcatcgccggcctgatcgccatcgtgatggtgaccatcatgctgtgctgcatgacctcttgctgttcctgtctgaagggctgctgctcctgcggctcctgctgcaagttcgacgaggacgactccgagcccgtgctgaagggcgtgaagctgcactacacctaaatgagaccata

SEQ ID NO: 159 - RNA, 4057 nt, synthetic construct
  source 1..4057: mol_type = other RNA
ataggtctcacacactagggcgcgccagtcctcaagctgggcctgacacaactgtgttcactagcaactactcccagacaccatggtactcccgactcctgaggtactccctgccgttactgccctgtggggcaaggtgatactccctgaagttggtggtgaggccctgggcaggctactcccggtctacccttggacccagaggtcgactcggaccggccaccatgttcgtgttcctggtgctgctccccctggtgagctcccagtgcgtcaacctgaccacacggacccagctgccccccgcctataccaacagcttcacccgcggcgtctactaccccgacaaggtgttccggagcagcgtgctgcacagcacccaggacctcttcctccccttttttagcaacgtgacctggttccacgccatccacgtgagtggcaccaacggcaccaagcggttcgacaaccctgtgctccccttcaacgacggcgtgtacttcgctagcacagaaaaaagtaacatcattcggggctggatcttcggcaccacactggatagcaaaacccagagcctgctgattgtgaataacgccaccaacgtggtgatcaaggtgtgcgagttccagttctgcaacgaccccttcctgggcgtgtactaccacaagaacaacaagagctggatggagagcgagttccgcgtgtatagctctgccaacaactgcaccttcgagtacgtgagccagcccttcctgatggacctggagggcaagcagggcaatttcaaaaacctgcgggagttcgtgttcaagaacatcgacggctacttcaagatctacagcaagcacacccccatcaacctggtgcgggacctgccccagggctttagcgctctggagcccctggtggacctgcccatcggcatcaacatcacccgcttccaaaccctgttggccctgcaccggagctacctgacccctggcgatagcagtagtggctggacagccggagccgccgcctactacgtgggatacctgcagccccggaccttcctgctgaagtacaacgagaacggcacaatcacagacgccgtggactgcgccctggaccccctgagcgaaacaaagtgcaccctcaaaagtttcaccgtggagaagggcatctaccagaccagcaacttccgggtgcagcccaccgagagcatcgtgcggttccccaacatcaccaacctgtgccccttcggcgaggtgttcaacgccacccggttcgccagcgtgtacgcctggaaccggaagcggatcagcaactgcgtggccgactacagcgtgctgtataacagtgccagcttcagcaccttcaagtgctacggcgtgagccccaccaagctgaacgacctgtgcttcaccaacgtgtacgccgacagcttcgtgatccggggcgacgaggtgcggcagatcgcccccggccagaccggcaagatcgccgattacaattacaagctgcccgacgatttcaccggctgcgtgatcgcctggaacagcaacaacctggacagcaaggtgggcggcaactacaactacctgtaccggctgttccgcaaaagtaacctgaagcccttcgagcgggacatcagcaccgagatctaccaggccggcagtaccccttgcaacggcgtcgagggcttcaactgctacttccccctgcagagctacggcttccagcccaccaacggcgtgggctaccagccctaccgggtggtggttctgagcttcgagctgctgcacgcccctgccaccgtgtgcggccccaagaaaagcaccaacctggtgaagaacaagtgcgtgaatttcaattttaacggactcaccggaaccggcgtgctgaccgagagcaacaagaagttcctgcccttccagcaattcggccgggatattgccgacaccactgacgccgtgcgggacccccagaccctggagatcctggacatcacaccctgtagcttcggcggggtgagcgtgatcacccccggcaccaacaccagcaaccaggtggccgtgctgtaccaggacgtgaactgcaccgaggtgcccgtggccatccacgccgaccagctgacccccacctggcgggtgtacagcaccggcagcaacgtgttccagacccgggccggctgcctgatcggcgccgagcacgtgaataacagctacgagtgcgacatccccatcggagccggaatctgcgccagctaccagacccagaccaacagcccccggagagcccggagcgtggccagccagagcattattgcctacaccatgagcctgggcgccgagaacagcgtggcctacagcaacaatagtattgccatccccaccaacttcaccatcagcgtgaccaccgaaatcctccccgtgagcatgaccaagaccagcgtggactgcaccatgtacatctgcggcgacagcaccgagtgcagcaacctgctcctgcagtacggcagcttctgcacccagctgaaccgggccctgaccggaattgccgtggagcaggacaagaacacccaggaggtgttcgcccaggtgaagcagatctacaagacacctcccatcaaggacttcggcggcttcaacttcagccagatcctgcccgaccccagcaagcccagcaagcggagcttcatcgaggacctgttgttcaacaaggtgaccctggccgacgccggcttcatcaagcagtacggcgactgtctgggagatattgccgcacgggacctgatctgcgcccagaagttcaacggcctgaccgtgctgcccccactgctgaccgacgagatgatcgcccagtacacaagcgctctgctcgccggcaccatcaccagcggctggaccttcggcgccggcgctgccctgcagatccccttcgccatgcagatggcctaccggttcaacggcatcggcgtgacccagaacgtgctgtacgagaaccagaagctgatcgccaaccagttcaacagcgccatcggcaagatccaggacagcctgagctccaccgccagcgccctgggcaagctgcaggacgtggtgaaccagaacgcccaggccctgaacaccctggtgaagcagctgagcagcaacttcggcgccatcagctctgtgctgaacgacatcctgagccggctggatcctcctgaggccgaggtgcaaatcgatcggctcatcaccggccggctgcagagcctgcagacctacgtgacacagcagctgatccgggccgccgagatccgggccagcgccaacctggccgctaccaagatgagcgagtgcgtgctgggccagagcaagcgggtggacttctgcggcaagggctaccacctgatgagcttcccccagagcgccccccacggcgtggtgttcctgcacgtgacctacgtgcccgcccaggagaagaacttcaccaccgcccccgccatctgccacgacggcaaggcccacttcccccgggagggcgtgttcgtgagcaacggcacccactggttcgtgacccagcggaacttctacgagccccagatcataaccacagacaacaccttcgtgagcggcaactgcgacgtggtcatcggcatcgtgaacaacaccgtgtacgaccccctgcagcccgagctggacagcttcaaggaggaactggacaagtacttcaagaaccacaccagccccgacgtggacctgggcgacatcagcggcatcaacgccagcgtggtgaacatccagaaggagatcgaccggctgaacgaggtggccaagaacctgaacgagagcctgatcgacctgcaggagctgggcaagtacgagcagtacatcaagtggccctggtacatctggctgggctttattgccggcctgatcgccatcgtgatggtgaccatcatgctgtgctgtatgacaagctgttgcagttgcctgaagggctgctgcagctgcggcagctgctgcaagttcgacgaggacgacagcgagcccgtgctgaagggcgtgaagctgcactacacctaaatgagaccata

SEQ ID NO: 160 - RNA, 3723 nt, synthetic construct
  source 1..3723: mol_type = other RNA
atgtaccggatgcagttgttgtcctgtatagctctttcccttgcattggtcactaattctgtgaacctcaccactcgcacacagctacctcccgcgtacactaattcatttaccaggggcgtctattatcctgataaggtgttccggagttcagtgttgcatagcactcaagacctgttcctgcccttcttctccaatgtcacttggtttcatgcgatacatgtgtctggtaccaacggaacgaagagatttgataaccccgtactgccattcaatgatggcgtatactttgcttcgactgaaaaatccaacatcatcaggggctggatttttggtacaacgcttgattccaagacccagtccctccttattgtgaacaatgcgaccaacgtcgtgataaaggtctgtgagtttcagttctgcaatgacccattccttggagtgtattatcacaagaacaacaaatcgtggatggagtcagagtttagggtgtacagcagcgctaacaactgtacatttgagtatgtgagtcagccgtttctgatggatcttgagggcaaacagggcaattttaagaatctcagagaatttgtgttcaagaacattgatggttactttaagatctatagcaaacatacgccaatcaacttggttcgtgatctgccacagggatttagcgcactggaacctctcgttgacttgcccataggtattaacatcaccaggttccagacgctcttggcattacaccgtagttatctgacccccggggactccagttccggatggactgcaggagccgctgcctactatgtgggttacctccagcccaggacctttcttttgaaatataacgagaacggcacaatcactgatgctgtggactgcgcattggatcctttgtcagagactaagtgcactctgaagtcattcacagtcgagaaaggcatttaccagacgtctaacttcagggttcagcctactgagtccatcgtgagattcccaaacatcacaaatctttgtcccttcggtgaggtattcaatgcgacacgatttgcctcagtgtacgcgtggaatcggaagaggatctccaattgcgtggccgactactccgtcttatacaactcagctagcttttcaacattcaagtgctatggcgtgagccctaccaagctcaatgacctgtgcttcactaatgtgtatgccgactcttttgtcattcgcggcgacgaggtccgacaaatcgcaccgggccaaaccggtaaaattgccgactacaactacaagctgcctgacgacttcaccggctgcgtaatcgcctggaacagcaataacctggatagcaaagtgggcggaaactacaactacctgtaccggctctttagaaagtccaacctgaaaccattcgagcgcgatatctcgaccgaaatctaccaggcgggcagcaccccctgtaatggtgtagaagggttcaattgttactttccactccagagttatgggttccagccgaccaatggcgtcggttatcaaccatatcgcgttgtggtgttgtcctttgagctgctacacgccccagctacagtgtgcgggccaaagaaaagcacaaatcttgtcaagaacaaatgcgttaactttaattttaatggactcacaggtacaggagtcctgaccgaatctaataagaagttcctgccctttcaacagttcggacgagacattgccgacaccaccgatgccgttcgggacccacagaccttagaaattctggatattactccatgtagttttgggggagtgtctgtcatcacccctggcactaatacatctaaccaggttgcagtcctctaccaggatgtgaactgtaccgaagtgccggtcgctattcacgcagaccagctcactcctacctggcgggtgtactccacaggctctaacgtgtttcagacacgtgcagggtgcctaatcggcgcagagcatgtaaataactcctatgagtgtgatatccccatcggagccgggatctgcgcttcctaccagacacaaacgaatagtcccggatctgcctcaagcgtggcatctcaatccattatagcatatacgatgtcccttggagctgaaaacagcgttgcgtattcaaacaatagtatcgctattccaaccaattttacaattagcgtgaccacagaaatactccctgtgagcatgaccaagaccagtgtagactgtactatgtacatctgcggcgacagtactgagtgtagcaatctgctgctacagtatgggtccttctgtactcagcttaatcgggctctcaccggaatcgctgtagagcaagataaaaacacacaagaagtgtttgctcaagtgaagcagatctataagacacctcccatcaaggatttcggtgggttcaactttagccagattctgcccgatccgtctaaaccgtccaagcgaagtttcatcgaagacctgcttttcaataaggtcacgctggcagatgctggatttatcaaacagtacggcgactgtctgggcgatatcgccgcaagagacttgatatgcgcccaaaagtttaatgggttaaccgtccttccaccgctcctgacagacgagatgatcgcccagtatacaagtgccttattagctgggaccattactagtggatggacatttggcgccggggctgctctacagatacccttcgccatgcagatggcttaccgcttcaacggaatcggagttacccagaacgtactgtacgaaaatcagaaactcatagctaatcaatttaactctgccatcgggaagattcaggattccctgtcgtctacagcgtccgccttggggaaactgcaagatgtagtgaaccagaacgcccaggccttaaatactctggtcaagcagttatcttcaaatttcggagcaattagctctgtgttgaacgatattctttccaggctggaccctccagaagccgaagtgcaaatagaccggctcatcacggggcgcttgcaaagcctgcaaacctatgtcacccagcaactgattcgagcagccgagatccgggccagtgctaatctggccgccacaaaaatgagcgagtgcgtcctcgggcagagcaaacgcgtagacttctgcggtaaaggctatcacctgatgagcttccctcagagcgcaccccacggggtggtcttcctccacgttacctacgtccctgcgcaggagaagaacttcactacggcccctgcaatttgccacgatggcaaggcccactttcccagggagggggtcttcgtttccaacgggactcattggttcgtgactcagagaaatttttatgaacctcagatcattaccactgataatacattcgtgtctggcaactgtgatgtggttattgggatagttaataatacggtatacgacccactccagcccgagctggactccttcaaagaggagctggacaagtactttaaaaatcacacctcacctgatgtggacctaggtgacatatctggcataaatgctagcgtggttaacattcagaaggaaatcgacagactcaacgaggtggccaaaaatctgaacgagagtctgatcgacctgcaggagttgggaaaatatgaacaggggtatatccctgaagcccccagggacggccaggcttacgtcagaaaggatggagagtgggtgctcttgagcaccttcctgtaa

SEQ ID NO: 161 - RNA, 3714 nt, synthetic construct
  source 1..3714: mol_type = other RNA
atgggagtcaaagttctgtttgccctgatctgcatcgctgtggccgaggccaaggttaatcttacaaccagaactcaattaccccctgcatacactaattctttcacacgtggtgtttattaccctgacaaagttttcagatcctcagttttacattcaactcaggacttgttcttacctttcttttccaatgttacttggttccatgctatacatgtctctgggaccaatggtactaagaggtttgataaccctgtcctaccatttaatgatggtgtttattttgcttccactgagaagtctaacataataagaggctggatttttggtactactttagattcgaagacccagtccctacttattgttaataacgctactaatgttgttattaaagtctgtgaatttcaattttgtaatgatccatttttgggtgtttattaccacaaaaacaacaaaagttggatggaaagtgagttcagagtttattctagtgcgaataattgcacttttgaatatgtctctcagccttttcttatggaccttgaaggaaaacagggtaatttcaaaaatcttagggaatttgtgtttaagaatattgatggttattttaaaatatattctaagcacacgcctattaatttagtgcgtgatctccctcagggtttttcggctttagaaccattggtagatttgccaataggtattaacatcactaggtttcaaactttacttgctttacatagaagttatttgactcctggtgattcttcttcaggttggacagctggtgctgcagcttattatgtgggttatcttcaacctaggacttttctattaaaatataatgaaaatggaaccattacagatgctgtagactgtgcacttgaccctctctcagaaacaaagtgtacgttgaaatccttcactgtagaaaaaggaatctatcaaacttctaactttagagtccaaccaacagaatctattgttagatttcctaatattacaaacttgtgcccttttggtgaagtttttaacgccaccagatttgcatccgtgtatgcttggaacaggaagagaatcagcaactgtgttgctgattattctgtcctatataattccgcatcattttccacttttaagtgttatggagtgtctcctactaaattaaatgatctctgctttactaatgtctatgcagattcatttgtaattagaggtgatgaagtcagacaaatcgctccagggcaaactggaaagattgctgattataattataaattaccagatgattttacaggctgcgttatagcttggaattctaacaatcttgattctaaggttggtggtaattataattacctgtatagattgtttaggaagtctaatctcaaaccttttgagagagatatttcaactgaaatctatcaggccggtagcacaccttgtaatggtgttgaaggttttaattgttactttcctttacaatcatatggtttccaacccactaatggtgttggttaccaaccatacagagtagtagtactttcttttgaacttctacatgcaccagcaactgtttgtggacctaaaaagtctactaatttggttaaaaacaaatgtgtcaatttcaacttcaatggtttaacaggcacaggtgttcttactgagtctaacaaaaagtttctgcctttccaacaatttggcagagacattgctgacactactgatgctgtccgtgatccacagacacttgagattcttgacattacaccatgttcttttggtggtgtcagtgttataacaccaggaacaaatacttctaaccaggttgctgttctttatcaggatgttaactgcacagaagtccctgttgctattcatgcagatcaacttactcctacttggcgtgtttattctacaggttctaatgtttttcaaacacgtgcaggctgtttaataggggctgaacatgtcaacaactcatatgagtgtgacatacccattggtgcaggtatatgcgctagttatcagactcagactaattctcctggcagcgccagcagtgtagctagtcaatccatcattgcctacactatgtcacttggtgcagaaaattcagttgcttactctaataactctattgccatacccacaaattttactattagtgttaccacagaaattctaccagtgtctatgaccaagacatcagtagattgtacaatgtacatttgtggtgattcaactgaatgcagcaatcttttgttgcaatatggcagtttttgtacacaattaaaccgtgctttaactggaatagctgttgaacaagacaaaaacacccaagaagtttttgcacaagtcaaacaaatttacaaaacaccaccaattaaagattttggtggttttaatttttcacaaatattaccagatccatcaaaaccaagcaagaggtcatttattgaagatctacttttcaacaaagtgacacttgcagatgctggcttcatcaaacaatatggtgattgccttggtgatattgctgctagggacctcatttgtgcacaaaagtttaacggccttactgttttgccacctttgctcacagatgaaatgattgctcaatacacttctgcactgttagcgggtacaatcacttctggttggacctttggtgcaggtgctgcattacaaataccatttgctatgcaaatggcttataggtttaatggtattggagttacacagaatgttctctatgagaaccaaaaattgattgccaaccaatttaatagtgctattggcaaaattcaagactcactttcttccacagcaagtgcacttggaaaacttcaagatgtggtcaaccaaaatgcacaagctttaaacacgcttgttaaacaacttagctccaattttggtgcaatttcaagtgttttaaatgatatcctttcacgtcttgaccctcccgaggctgaagtgcaaattgataggttgatcacaggcagacttcaaagtttgcagacatatgtgactcaacaattaattagagctgcagaaatcagagcttctgctaatcttgctgctactaaaatgtcagagtgtgtacttggacaatcaaaaagagttgatttttgtggaaagggctatcatcttatgtccttccctcagtcagcacctcatggtgtagtcttcttgcatgtgacttatgtccctgcacaagaaaagaacttcacaactgctcctgccatttgtcatgatggaaaagcacactttcctcgtgaaggtgtctttgtttcaaatggcacacactggtttgtaacacaaaggaatttttatgaaccacaaatcattactacagacaacacatttgtgtctggtaactgtgatgttgtaataggaattgtcaacaacacagtttatgatcctttgcaacctgaattagactcattcaaggaggagttagataaatattttaagaatcatacatcaccagatgttgatttaggtgacatctctggcattaatgcttcagttgtaaacattcaaaaagaaattgaccgcctcaatgaggttgccaagaatttaaatgaatctctcatcgatctccaagaacttggaaagtatgagcaggggtatatccctgaagcccccagggacggccaggcttacgtcagaaaggatggagagtgggtgctcttgagcaccttcctg

SEQ ID NO: 162 - RNA, 3828 nt, synthetic construct
  source 1..3828: mol_type = other RNA
atgggagtcaaagttctgtttgccctgatctgcatcgctgtggccgaggccaaggttaatcttacaaccagaactcaattaccccctgcatacactaattctttcacacgtggtgtttattaccctgacaaagttttcagatcctcagttttacattcaactcaggatttgttcttacctttcttttccaatgttacttggttccatgctatacatgtctctgggaccaatggtactaagaggtttgataaccctgtcctaccatttaatgatggtgtttattttgcttccactgagaagtctaacataataagaggctggatctttggtactactttagattcgaagacccagtccctacttattgttaataacgctactaatgttgttattaaagtctgtgaatttcaattttgtaatgatccatttttgggtgtttattaccacaaaaacaacaaaagttggatggaaagtgagttcagagtttattctagtgcgaataattgcacttttgaatatgtctctcagccttttcttatggaccttgaaggaaaacagggtaatttcaaaaatcttagggaatttgtgtttaagaatattgatggttattttaaaatatattctaagcacacgcctattaatttagtgcgtgatctccctcagggtttttcggctttagaaccattggtagatttgccaataggtattaacatcactaggtttcaaactttacttgctttacatagaagttatttgactcctggtgattcttcttcaggttggacagctggtgctgcagcttattatgtgggttatcttcaacctaggacttttctattaaaatataatgaaaatggaaccattacagatgctgtagactgtgcacttgaccctctctcagaaacaaagtgtacgttgaaatccttcactgtagaaaaaggaatctatcaaacttctaactttagagtccaaccaacagaatctattgttagatttcctaatattacaaacttgtgcccttttggtgaagtttttaacgccaccagatttgcatccgtgtatgcttggaacaggaagagaatcagcaactgtgttgctgattattctgtcctatataattccgcatcattttccacttttaagtgttatggagtgtctcctactaaattaaatgatctctgctttactaatgtctatgcagattcatttgtaattagaggtgatgaagtcagacaaatcgctccagggcaaactggaaagattgctgattataattataaattaccagatgattttacaggctgcgttatagcttggaattctaacaatcttgattctaaggttggtggtaattataattacctgtatagattgtttaggaagtctaatctcaaaccttttgagagagatatttcaactgaaatctatcaggccggtagcacaccttgtaatggtgttgaaggttttaattgttactttcctttacaatcatatggtttccaacccactaatggtgttggttaccaaccatacagagtagtagtactttcttttgaacttctacatgcaccagcaactgtttgtggacctaaaaagtctactaatttggttaaaaacaaatgtgtcaatttcaacttcaatggtttaacaggcacaggtgttcttactgagtctaacaaaaagtttctgcctttccaacaatttggcagagacattgctgacactactgatgctgtccgtgatccacagacacttgagattcttgacattacaccatgttcttttggtggtgtcagtgttataacaccaggaacaaatacttctaaccaggttgctgttctttatcaggatgttaactgcacagaagtccctgttgctattcatgcagatcaacttactcctacttggcgtgtttattctacaggttctaatgtttttcaaacacgtgcaggctgtttaataggggctgaacatgtcaacaactcatatgagtgtgacatacccattggtgcaggtatatgcgctagttatcagactcagactaattctcctggcagcgccagcagtgtagctagtcaatccatcattgcctacactatgtcacttggtgcagaaaattcagttgcttactctaataactctattgccatacccacaaattttactattagtgttaccacagaaattctaccagtgtctatgaccaagacatcagtagattgtacaatgtacatttgtggtgattcaactgaatgcagcaatcttttgttgcaatatggcagtttttgtacacaattaaaccgtgctttaactgggatagctgttgaacaagacaaaaacacccaagaagtttttgcacaagtcaaacaaatttacaaaacaccaccaattaaagattttggtggttttaatttttcacaaatattaccagatccatcaaaaccaagcaagaggtcatttattgaagatctacttttcaacaaagtgacacttgcagatgctggcttcatcaaacaatatggtgattgccttggtgatattgctgctagggacctcatttgtgcacaaaagtttaacggccttactgttttgccacctttgctcacagatgaaatgattgctcaatacacttctgcactgttagcgggtacaatcacttctggttggacctttggtgcaggtgctgcattacaaataccatttgctatgcaaatggcttataggtttaatggtattggagttacacagaatgttctctatgagaaccaaaaattgattgccaaccaatttaatagtgccattggcaaaattcaagactcactttcttccacagcaagtgcacttggaaaacttcaagatgtggtcaaccaaaatgcacaagctttaaacacgcttgttaaacaacttagctccaattttggtgcaatttcaagtgttttaaatgatatcctttcacgtcttgaccctcccgaggctgaagtgcaaattgataggttgatcacaggcagacttcaaagtttgcagacatatgtgactcaacaattaattagagctgcagaaatcagagcttctgctaatcttgctgctactaaaatgtcagagtgtgtacttggacaatcaaaaagagttgatttttgtggaaagggctatcatcttatgtccttccctcagtcagcacctcatggtgtagtcttcttgcatgtgacttatgtccctgcacaagaaaagaacttcacaactgctcctgccatttgtcatgatggaaaagcacactttcctcgtgaaggtgtctttgtttcaaatggcacacactggtttgtaacacaaaggaatttttatgaaccacaaatcattactacagacaacacatttgtgtctggtaactgtgatgttgtaataggaattgtcaacaacacagtttatgatcctttgcaacctgaattagactcattcaaggaggagttagataaatattttaagaatcatacatcaccagatgttgatttaggtgacatctctggcattaatgcttcagttgtaaacattcaaaaagaaattgaccgcctcaatgaggttgccaagaatttaaatgaatctctcatcgatctccaagaacttggaaagtatgagcagtatataaaatggccatggtacatttggctaggttttatagctggcttgattgccatagtaatggtgacaattatgctttgctgtatgaccagttgctgtagttgtctcaagggctgttgttcttgtggatcctgctgcaaatttgatgaagacgactctgagccagtgctcaaaggagtcaaattacattacaca

SEQ ID NO: 163 - RNA, 807 nt, synthetic construct
  source 1..807: mol_type = other RNA
atgggagtcaaagttctgtttgccctgatctgcatcgctgtggccgaggccaagagagtccaaccaacagaatctattgttagatttcctaatattacaaacttgtgcccttttggtgaagtttttaacgccaccagatttgcatccgtgtatgcttggaacaggaagagaatcagcaactgtgttgctgattattctgtcctatataattccgcatcattttccacttttaagtgttatggagtgtctcctactaaattaaatgatctctgctttactaatgtctatgcagattcatttgtaattagaggtgatgaagtcagacaaatcgctccagggcaaactggaaagattgctgattataattataaattaccagatgattttacaggctgcgttatagcttggaattctaacaatcttgattctaaggttggtggtaattataattacctgtatagattgtttaggaagtctaatctcaaaccttttgagagagatatttcaactgaaatctatcaggccggtagcacaccttgtaatggtgttgaaggttttaattgttactttcctttacaatcatatggtttccaacccactaatggtgttggttaccaaccatacagagtagtagtactttcttttgaacttctacatgcaccagcaactgtttgtggacctaaaaagtctactaatttggttaaaaacaaatgtgtcaatttcgggtatatccctgaagcccccagggacggccaggcttacgtcagaaaggatggagagtgggtgctcttgagcaccttcctgtaa

SEQ ID NO: 164 - RNA, 3819 nt, synthetic construct
  source 1..3819: mol_type = other RNA
atgtttgtttttcttgttttattgccactagtctctagtcagtgtgttaatcttacaaccagaactcaattaccccctgcatacactaattctttcacacgtggtgtttattaccctgacaaagttttcagatcctcagttttacattcaactcaggatttgttcttacctttcttttccaatgttacttggttccatgctatacatgtctctgggaccaatggtactaagaggtttgataaccctgtcctaccatttaatgatggtgtttattttgcttccactgagaagtctaacataataagaggctggatctttggtactactttagattcgaagacccagtccctacttattgttaataacgctactaatgttgttattaaagtctgtgaatttcaattttgtaatgatccatttttgggtgtttattaccacaaaaacaacaaaagttggatggaaagtgagttcagagtttattctagtgcgaataattgcacttttgaatatgtctctcagccttttcttatggaccttgaaggaaaacagggtaatttcaaaaatcttagggaatttgtgtttaagaatattgatggttattttaaaatatattctaagcacacgcctattaatttagtgcgtgatctccctcagggtttttcggctttagaaccattggtagatttgccaataggtattaacatcactaggtttcaaactttacttgctttacatagaagttatttgactcctggtgattcttcttcaggttggacagctggtgctgcagcttattatgtgggttatcttcaacctaggacttttctattaaaatataatgaaaatggaaccattacagatgctgtagactgtgcacttgaccctctctcagaaacaaagtgtacgttgaaatccttcactgtagaaaaaggaatctatcaaacttctaactttagagtccaaccaacagaatctattgttagatttcctaatattacaaacttgtgcccttttggtgaagtttttaacgccaccagatttgcatccgtgtatgcttggaacaggaagagaatcagcaactgtgttgctgattattctgtcctatataattccgcatcattttccacttttaagtgttatggagtgtctcctactaaattaaatgatctctgctttactaatgtctatgcagattcatttgtaattagaggtgatgaagtcagacaaatcgctccagggcaaactggaaagattgctgattataattataaattaccagatgattttacaggctgcgttatagcttggaattctaacaatcttgattctaaggttggtggtaattataattacctgtatagattgtttaggaagtctaatctcaaaccttttgagagagatatttcaactgaaatctatcaggccggtagcacaccttgtaatggtgttgaaggttttaattgttactttcctttacaatcatatggtttccaacccactaatggtgttggttaccaaccatacagagtagtagtactttcttttgaacttctacatgcaccagcaactgtttgtggacctaaaaagtctactaatttggttaaaaacaaatgtgtcaatttcaacttcaatggtttaacaggcacaggtgttcttactgagtctaacaaaaagtttctgcctttccaacaatttggcagagacattgctgacactactgatgctgtccgtgatccacagacacttgagattcttgacattacaccatgttcttttggtggtgtcagtgttataacaccaggaacaaatacttctaaccaggttgctgttctttatcagggtgttaactgcacagaagtccctgttgctattcatgcagatcaacttactcctacttggcgtgtttattctacaggttctaatgtttttcaaacacgtgcaggctgtttaataggggctgaacatgtcaacaactcatatgagtgtgacatacccattggtgcaggtatatgcgctagttatcagactcagactaattctcctggcagcgccagcagtgtagctagtcaatccatcattgcctacactatgtcacttggtgcagaaaattcagttgcttactctaataactctattgccatacccacaaattttactattagtgttaccacagaaattctaccagtgtctatgaccaagacatcagtagattgtacaatgtacatttgtggtgattcaactgaatgcagcaatcttttgttgcaatatggcagtttttgtacacaattaaaccgtgctttaactgggatagctgttgaacaagacaaaaacacccaagaagtttttgcacaagtcaaacaaatttacaaaacaccaccaattaaagattttggtggttttaatttttcacaaatattaccagatccatcaaaaccaagcaagaggtcatttattgaagatctacttttcaacaaagtgacacttgcagatgctggcttcatcaaacaatatggtgattgccttggtgatattgctgctagggacctcatttgtgcacaaaagtttaacggccttactgttttgccacctttgctcacagatgaaatgattgctcaatacacttctgcactgttagcgggtacaatcacttctggttggacctttggtgcaggtgctgcattacaaataccatttgctatgcaaatggcttataggtttaatggtattggagttacacagaatgttctctatgagaaccaaaaattgattgccaaccaatttaatagtgccattggcaaaattcaagactcactttcttccacagcaagtgcacttggaaaacttcaagatgtggtcaaccaaaatgcacaagctttaaacacgcttgttaaacaacttagctccaattttggtgcaatttcaagtgttttaaatgatatcctttcacgtcttgaccctcccgaggctgaagtgcaaattgataggttgatcacaggcagacttcaaagtttgcagacatatgtgactcaacaattaattagagctgcagaaatcagagcttctgctaatcttgctgctactaaaatgtcagagtgtgtacttggacaatcaaaaagagttgatttttgtggaaagggctatcatcttatgtccttccctcagtcagcacctcatggtgtagtcttcttgcatgtgacttatgtccctgcacaagaaaagaacttcacaactgctcctgccatttgtcatgatggaaaagcacactttcctcgtgaaggtgtctttgtttcaaatggcacacactggtttgtaacacaaaggaatttttatgaaccacaaatcattactacagacaacacatttgtgtctggtaactgtgatgttgtaataggaattgtcaacaacacagtttatgatcctttgcaacctgaattagactcattcaaggaggagttagataaatattttaagaatcatacatcaccagatgttgatttaggtgacatctctggcattaatgcttcagttgtaaacattcaaaaagaaattgaccgcctcaatgaggttgccaagaatttaaatgaatctctcatcgatctccaagaacttggaaagtatgagcagtatataaaatggccatggtacatttggctaggttttatagctggcttgattgccatagtaatggtgacaattatgctttgctgtatgaccagttgctgtagttgtctcaagggctgttgttcttgtggatcctgctgcaaatttgatgaagacgactctgagccagtgctcaaaggagtcaaattacattacaca

SEQ ID NO: 165 - RNA, 819 nt, synthetic construct
  source 1..819: mol_type = other RNA
atgggagtcaaagttctgtttgccctgatctgcattgctgtggccgaggccaagagagtccaaccaacagaatctattgttagatttcctaatattacaaacttgtgcccttttggtgaagtttttaacgccaccagatttgcatccgtgtatgcttggaacaggaagagaatcagcaactgtgttgctgattattctgtcctatataattccgcatcattttccacttttaagtgttatggagtgtctcctactaaattaaatgatctctgctttactaatgtctatgcagattcatttgtaattagaggtgatgaagtcagacaaatcgctccagggcaaactggaaagattgctgattataattataaattaccagatgattttacaggctgcgttatagcttggaattctaacaatcttgattctaaggttggtggtaattataattacctgtatagattgtttaggaagtctaatctcaaaccttttgagagagatatttcaactgaaatctatcaggccggtagcacaccttgtaatggtgttgaaggttttaattgttactttcctttacaatcatatggtttccaacccactaatggtgttggttaccaaccatacagagtagtagtactttcttttgaacttctacatgcaccagcaactgtttgtggacctaaaaagtctactaatttggttaaaaacaaatgtgtcaatttcggaggaggaggaagcggatacatccccgaggccccccgggacggccaggcctacgtgcggaaggacggcgagtgggtgctgctcagcaccttcctg

SEQ ID NO: 166 - RNA, 1503 nt, synthetic construct
  source 1..1503: mol_type = other RNA
atgggagtcaaagttctgtttgccctgatctgcattgctgtggccgaggccaagagagtccaaccaacagaatctattgttagatttcctaatattacaaacttgtgcccttttggtgaagtttttaacgccaccagatttgcatccgtgtatgcttggaacaggaagagaatcagcaactgtgttgctgattattctgtcctatataattccgcatcattttccacttttaagtgttatggagtgtctcctactaaattaaatgatctctgctttactaatgtctatgcagattcatttgtaattagaggtgatgaagtcagacaaatcgctccagggcaaactggaaagattgctgattataattataaattaccagatgattttacaggctgcgttatagcttggaattctaacaatcttgattctaaggttggtggtaattataattacctgtatagattgtttaggaagtctaatctcaaaccttttgagagagatatttcaactgaaatctatcaggccggtagcacaccttgtaatggtgttgaaggttttaattgttactttcctttacaatcatatggtttccaacccactaatggtgttggttaccaaccatacagagtagtagtactttcttttgaacttctacatgcaccagcaactgtttgtggacctaaaaagtctactaatttggttaaaaacaaatgtgtcaatttcggaggaggaggaagcggatacatccccgaggccccccgggacggccaggcctacgtgcggaaggacggcgagtgggtgctgctcagcaccttcctgggaggaggaggaagcagagtccaaccaacagaatctattgttagatttcctaatattacaaacttgtgcccttttggtgaagtttttaacgccaccagatttgcatccgtgtatgcttggaacaggaagagaatcagcaactgtgttgctgattattctgtcctatataattccgcatcattttccacttttaagtgttatggagtgtctcctactaaattaaatgatctctgctttactaatgtctatgcagattcatttgtaattagaggtgatgaagtcagacaaatcgctccagggcaaactggaaagattgctgattataattataaattaccagatgattttacaggctgcgttatagcttggaattctaacaatcttgattctaaggttggtggtaattataattacctgtatagattgtttaggaagtctaatctcaaaccttttgagagagatatttcaactgaaatctatcaggccggtagcacaccttgtaatggtgttgaaggttttaattgttactttcctttacaatcatatggtttccaacccactaatggtgttggttaccaaccatacagagtagtagtactttcttttgaacttctacatgcaccagcaactgtttgtggacctaaaaagtctactaatttggttaaaaacaaatgtgtcaatttc

SEQ ID NO: 167 - RNA, 1212 nt, synthetic construct
  source 1..1212: mol_type = other RNA
atgggagtcaaagttctgtttgccctgatctgcattgctgtggccgaggccaagagagtccaaccaacagaatctattgttagatttcctaatattacaaacttgtgcccttttggtgaagtttttaacgccaccagatttgcatccgtgtatgcttggaacaggaagagaatcagcaactgtgttgctgattattctgtcctatataattccgcatcattttccacttttaagtgttatggagtgtctcctactaaattaaatgatctctgctttactaatgtctatgcagattcatttgtaattagaggtgatgaagtcagacaaatcgctccagggcaaactggaaagattgctgattataattataaattaccagatgattttacaggctgcgttatagcttggaattctaacaatcttgattctaaggttggtggtaattataattacctgtatagattgtttaggaagtctaatctcaaaccttttgagagagatatttcaactgaaatctatcaggccggtagcacaccttgtaatggtgttgaaggttttaattgttactttcctttacaatcatatggtttccaacccactaatggtgttggttaccaaccatacagagtagtagtactttcttttgaacttctacatgcaccagcaactgtttgtggacctaaaaagtctactaatttggttaaaaacaaatgtgtcaatttcgacatcattaagctgctcaacgagcaggtgaacaaggagatgaacagctccaacctgtacatgagcatgagcagctggtgctacacccacagcctggacggcgccggcctgttcctgtttgaccacgccgctgaggaatacgagcacgccaagaaactgatcgtgttcctgaacgagaacaacgtgcccgtgcagctgaccagcatcagcgcccccgagcacaagttcgagagcctgacccagatcttccagaaggcctacgagcacgagcagcacatcagcgagagcatcaacaacatcgtcgaccacgccatcaagggcaaggaccacgccaccttcaacttcctgcagtggtacgtgagcgagcagcacgaggaggaggtgctgttcaaggacatcctggacaagatcgagctgatcggcaacgagaaccacggcctgtacctggccgaccagtacgtgaagggcatcgccaagagccgcaaaagt

SEQ ID NO: 168 - RNA, 1227 nt, synthetic construct
  source 1..1227: mol_type = other RNA
atgggagtcaaagttctgtttgccctgatctgcattgctgtggccgaggccaagagagtccaaccaacagaatctattgttagatttcctaatattacaaacttgtgcccttttggtgaagtttttaacgccaccagatttgcatccgtgtatgcttggaacaggaagagaatcagcaactgtgttgctgattattctgtcctatataattccgcatcattttccacttttaagtgttatggagtgtctcctactaaattaaatgatctctgctttactaatgtctatgcagattcatttgtaattagaggtgatgaagtcagacaaatcgctccagggcaaactggaaagattgctgattataattataaattaccagatgattttacaggctgcgttatagcttggaattctaacaatcttgattctaaggttggtggtaattataattacctgtatagattgtttaggaagtctaatctcaaaccttttgagagagatatttcaactgaaatctatcaggccggtagcacaccttgtaatggtgttgaaggttttaattgttactttcctttacaatcatatggtttccaacccactaatggtgttggttaccaaccatacagagtagtagtactttcttttgaacttctacatgcaccagcaactgtttgtggacctaaaaagtctactaatttggttaaaaacaaatgtgtcaatttcggaggaggaggaagcgacatcattaagctgctcaacgagcaggtgaacaaggagatgaacagctccaacctgtacatgagcatgagcagctggtgctacacccacagcctggacggcgccggcctgttcctgtttgaccacgccgctgaggaatacgagcacgccaagaaactgatcgtgttcctgaacgagaacaacgtgcccgtgcagctgaccagcatcagcgcccccgagcacaagttcgagagcctgacccagatcttccagaaggcctacgagcacgagcagcacatcagcgagagcatcaacaacatcgtcgaccacgccatcaagggcaaggaccacgccaccttcaacttcctgcagtggtacgtgagcgagcagcacgaggaggaggtgctgttcaaggacatcctggacaagatcgagctgatcggcaacgagaaccacggcctgtacctggccgaccagtacgtgaagggcatcgccaagagccgcaaaagt

SEQ ID NO: 169 - RNA, 1320 nt, synthetic construct
  source 1..1320: mol_type = other RNA
atgggagtcaaagttctgtttgccctgatctgcattgctgtggccgaggccaagagagtccaaccaacagaatctattgttagatttcctaatattacaaacttgtgcccttttggtgaagtttttaacgccaccagatttgcatccgtgtatgcttggaacaggaagagaatcagcaactgtgttgctgattattctgtcctatataattccgcatcattttccacttttaagtgttatggagtgtctcctactaaattaaatgatctctgctttactaatgtctatgcagattcatttgtaattagaggtgatgaagtcagacaaatcgctccagggcaaactggaaagattgctgattataattataaattaccagatgattttacaggctgcgttatagcttggaattctaacaatcttgattctaaggttggtggtaattataattacctgtatagattgtttaggaagtctaatctcaaaccttttgagagagatatttcaactgaaatctatcaggccggtagcacaccttgtaatggtgttgaaggttttaattgttactttcctttacaatcatatggtttccaacccactaatggtgttggttaccaaccatacagagtagtagtactttcttttgaacttctacatgcaccagcaactgtttgtggacctaaaaagtctactaatttggttaaaaacaaatgtgtcaatttccccggcagcggctacatccccgaggccccccgggacggccaggcctacgtgcggaaggacggcgagtgggtgctgctcagcaccttcctgagcggccggagcggcggagacatcattaagctgctgaacgagcaggtgaacaaggagatgaacagctccaacctgtacatgagcatgagcagctggtgctacacccacagcctggacggcgccggcctgttcctgtttgaccacgccgctgaggaatacgagcacgccaagaaactgatcgtgttcctgaacgagaacaacgtgcccgtgcagctgaccagcatcagcgcccccgagcacaagttcgagagcctgacccagatcttccagaaggcctacgagcacgagcagcacatcagcgagagcatcaacaacatcgtcgaccacgccatcaagggcaaggaccacgccaccttcaacttcctgcagtggtacgtgagcgagcagcacgaggaggaggtgctgttcaaggacatcctggacaagatcgagctgatcggcaacgagaaccacggcctgtacctggccgaccagtacgtgaagggcatcgccaagagccgcaaaagt

SEQ ID NO: 170 - RNA, 795 nt, synthetic construct
  source 1..795: mol_type = other RNA
atgggagtcaaagttctgtttgccctgatctgcattgctgtggccgaggccaagagagtccaaccaacagaatctattgttagatttcctaatattacaaacttgtgcccttttggtgaagtttttaacgccaccagatttgcatccgtgtatgcttggaacaggaagagaatcagcaactgtgttgctgattattctgtcctatataattccgcatcattttccacttttaagtgttatggagtgtctcctactaaattaaatgatctctgctttactaatgtctatgcagattcatttgtaattagaggtgatgaagtcagacaaatcgctccagggcaaactggaaagattgctgattataattataaattaccagatgattttacaggctgcgttatagcttggaattctaacaatcttgattctaaggttggtggtaattataattacctgtatagattgtttaggaagtctaatctcaaaccttttgagagagatatttcaactgaaatctatcaggccggtagcacaccttgtaatggtgttgaaggttttaattgttactttcctttacaatcatatggtttccaacccactaatggtgttggttaccaaccatacagagtagtagtactttcttttgaacttctacatgcaccagcaactgtttgtggacctaaaaagtctactaatttggttaaaaacaaatgtgtcaatttcatcaaccacgtgggcggaaccggcggcgccatcatggcccccgtggccgtgacccggcagctggtgggcagc

SEQ ID NO: 171 - RNA, 810 nt, synthetic construct
  source 1..810: mol_type = other RNA
atgggagtcaaagttctgtttgccctgatctgcattgctgtggccgaggccaagagagtccaaccaacagaatctattgttagatttcctaatattacaaacttgtgcccttttggtgaagtttttaacgccaccagatttgcatccgtgtatgcttggaacaggaagagaatcagcaactgtgttgctgattattctgtcctatataattccgcatcattttccacttttaagtgttatggagtgtctcctactaaattaaatgatctctgctttactaatgtctatgcagattcatttgtaattagaggtgatgaagtcagacaaatcgctccagggcaaactggaaagattgctgattataattataaattaccagatgattttacaggctgcgttatagcttggaattctaacaatcttgattctaaggttggtggtaattataattacctgtatagattgtttaggaagtctaatctcaaaccttttgagagagatatttcaactgaaatctatcaggccggtagcacaccttgtaatggtgttgaaggttttaattgttactttcctttacaatcatatggtttccaacccactaatggtgttggttaccaaccatacagagtagtagtactttcttttgaacttctacatgcaccagcaactgtttgtggacctaaaaagtctactaatttggttaaaaacaaatgtgtcaatttcggaggaggaggaagcatcaaccacgtgggcggaaccggcggcgccatcatggcccccgtggccgtgacccggcagctggtgggcagc

SEQ ID NO: 172 - RNA, 795 nt, synthetic construct
  source 1..795: mol_type = other RNA
atgggagtcaaagttctgtttgccctgatctgcattgctgtggccgaggccaagatcaaccacgtgggcggaaccggcggcgccatcatggcccccgtggccgtgacccggcagctggtgggcagcagagtccaaccaacagaatctattgttagatttcctaatattacaaacttgtgcccttttggtgaagtttttaacgccaccagatttgcatccgtgtatgcttggaacaggaagagaatcagcaactgtgttgctgattattctgtcctatataattccgcatcattttccacttttaagtgttatggagtgtctcctactaaattaaatgatctctgctttactaatgtctatgcagattcatttgtaattagaggtgatgaagtcagacaaatcgctccagggcaaactggaaagattgctgattataattataaattaccagatgattttacaggctgcgttatagcttggaattctaacaatcttgattctaaggttggtggtaattataattacctgtatagattgtttaggaagtctaatctcaaaccttttgagagagatatttcaactgaaatctatcaggccggtagcacaccttgtaatggtgttgaaggttttaattgttactttcctttacaatcatatggtttccaacccactaatggtgttggttaccaaccatacagagtagtagtactttcttttgaacttctacatgcaccagcaactgtttgtggacctaaaaagtctactaatttggttaaaaacaaatgtgtcaatttc

SEQ ID NO: 173 - RNA, 810 nt, synthetic construct
  source 1..810: mol_type = other RNA
atgggagtcaaagttctgtttgccctgatctgcattgctgtggccgaggccaagatcaaccacgtgggcggaaccggcggcgccatcatggcccccgtggccgtgacccggcagctggtgggcagcggaggaggaggaagcagagtccaaccaacagaatctattgttagatttcctaatattacaaacttgtgcccttttggtgaagtttttaacgccaccagatttgcatccgtgtatgcttggaacaggaagagaatcagcaactgtgttgctgattattctgtcctatataattccgcatcattttccacttttaagtgttatggagtgtctcctactaaattaaatgatctctgctttactaatgtctatgcagattcatttgtaattagaggtgatgaagtcagacaaatcgctccagggcaaactggaaagattgctgattataattataaattaccagatgattttacaggctgcgttatagcttggaattctaacaatcttgattctaaggttggtggtaattataattacctgtatagattgtttaggaagtctaatctcaaaccttttgagagagatatttcaactgaaatctatcaggccggtagcacaccttgtaatggtgttgaaggttttaattgttactttcctttacaatcatatggtttccaacccactaatggtgttggttaccaaccatacagagtagtagtactttcttttgaacttctacatgcaccagcaactgtttgtggacctaaaaagtctactaatttggttaaaaacaaatgtgtcaatttc

SEQ ID NO: 174 - RNA, 807 nt, synthetic construct
  source 1..807: mol_type = other RNA
atgggagtcaaagttctgtttgccctgatctgcattgctgtggccgaggccaagagagtccaaccaacagaatctattgttagatttcctaatattacaaacttgtgcccttttggtgaagtttttaacgccaccagatttgcatccgtgtatgcttggaacaggaagagaatcagcaactgtgttgctgattattctgtcctatataattccgcatcattttccacttttaagtgttatggagtgtctcctactaaattaaatgatctctgctttactaatgtctatgcagattcatttgtaattagaggtgatgaagtcagacaaatcgctccagggcaaactggaaagattgctgattataattataaattaccagatgattttacaggctgcgttatagcttggaattctaacaatcttgattctaaggttggtggtaattataattacctgtatagattgtttaggaagtctaatctcaaaccttttgagagagatatttcaactgaaatctatcaggccggtagcacaccttgtaatggtgttgaaggttttaattgttactttcctttacaatcatatggtttccaacccactaatggtgttggttaccaaccatacagagtagtagtactttcttttgaacttctacatgcaccagcaactgtttgtggacctaaaaagtctactaatttggttaaaaacaaatgtgtcaatttcgggtatatccctgaagcccccagggacggccaggcttacgtcagaaaggatggagagtgggtgctcttgagcaccttcctgtaa

SEQ ID NO: 175 - protein, 6 aa, synthetic construct
CHYSEL

SEQ ID NO: 176 - protein, 9 aa, synthetic construct
  VARIANT 1: note = G, H, or absent
  VARIANT 2: note = D, G, or absent
  VARIANT 3: note = D, V, I, S, or M
  VARIANT 5: note = Any amino acid
XXXEXNPGP

SEQ ID NO: 177 - protein, 9 aa, synthetic construct
GDVESNPGP

SEQ ID NO: 178 - protein, 9 aa, synthetic construct
GDIEENPGP

SEQ ID NO: 179 - protein, 7 aa, synthetic construct
VEPNPGP

SEQ ID NO: 180 - protein, 7 aa, synthetic construct
IETNPGP

SEQ ID NO: 181 - protein, 9 aa, synthetic construct
GDIESNPGP

SEQ ID NO: 182 - protein, 9 aa, synthetic construct
GDVELNPGP

SEQ ID NO: 183 - protein, 9 aa, synthetic construct
GDIETNPGP

SEQ ID NO: 184 - protein, 8 aa, synthetic construct
GDVENPGP

SEQ ID NO: 185 - protein, 9 aa, synthetic construct
GDVEENPGP

SEQ ID NO: 186 - protein, 9 aa, synthetic construct
GDVEQNPGP

SEQ ID NO: 187 - protein, 7 aa, synthetic construct
IESNPGP

SEQ ID NO: 188 - protein, 9 aa, synthetic construct
GDIELNPGP

SEQ ID NO: 189 - protein, 9 aa, synthetic construct
HDIETNPGP

SEQ ID NO: 190 - protein, 9 aa, synthetic construct
HDVETNPGP

SEQ ID NO: 191 - protein, 9 aa, synthetic construct
HDVEMNPGP

SEQ ID NO: 192 - protein, 9 aa, synthetic construct
GDMESNPGP

SEQ ID NO: 193 - protein, 9 aa, synthetic construct
GDVETNPGP

SEQ ID NO: 194 - protein, 9 aa, synthetic construct
GDIEQNPGP

SEQ ID NO: 195 - protein, 8 aa, synthetic construct
DSEFNPGP

SEQ ID NO: 196 - skipped

SEQ ID NO: 197 - protein, 28 aa, synthetic construct
MGVHECPAWLWLLLSLLSLPLGLPVLGA

SEQ ID NO: 198 - protein, 18 aa, synthetic construct
MGVKVLFALICIAVAEAK

SEQ ID NO: 199 - protein, 20 aa, synthetic construct
MYRMQLLSCIALSLALVTNS

SEQ ID NO: 200 - protein, 13 aa, synthetic construct
MFVFLVLLPLVSS

SEQ ID NO: 201 - protein, 5 aa, synthetic construct
GRLRR

SEQ ID NO: 202 - protein, 22 aa, synthetic construct
GSGATNFSLLKQAGDVEENPGP

SEQ ID NO: 203 - protein, 5 aa, synthetic construct
GRLRR

SEQ ID NO: 204 - protein, 27 aa, synthetic construct
GYIPEAPRDGQAYVRKDGEWVLLSTFL

SEQ ID NO: 205 - protein, 24 aa, synthetic construct
  VARIANT 24: note = May be absent
INHVGGTGGAIMAPVAVTRQLVGS

SEQ ID NO: 206 - protein, 199 aa, synthetic construct
PGSGYIPEAPRDGQAYVRKDGEWVLLSTFLSGRSGGDIIKLLNEQVNKEMNSSNLYMSMSSWCYTHSLDGAGLFLFDHAAEEYEHAKKLIVFLNENNVPVQLTSISAPEHKFESLTQIFQKAYEHEQHISESINNIVDHAIKGKDHATFNFLQWYVSEQHEEEVLFKDILDKIELIGNENHGLYLADQYVKGIAKSRKS

SEQ ID NO: 207 - protein, 163 aa, synthetic construct
DIIKLLNEQVNKEMNSSNLYMSMSSWCYTHSLDGAGLFLFDHAAEEYEHAKKLIVFLNENNVPVQLTSISAPEHKFESLTQIFQKAYEHEQHISESINNIVDHAIKGKDHATFNFLQWYVSEQHEEEVLFKDILDKIELIGNENHGLYLADQYVKGIAKSRKS

SEQ ID NO: 208 - protein, 153 aa, synthetic construct
QIYEGKLTAEGLRFGIVASRFNHALVDRLVEGAIDAIVRHGGREEDITLVRVPGSWEIPVAAGELARKENISAVIAIGVLIRGATPHFDYIASEVSKGLADLSLELRKPITFGVITADTLEQAIERAGTKHGNKGWEAALSAIEMANLFKSLR

SEQ ID NO: 209 - protein, 153 aa, synthetic construct
QIYEGKLTAEGLRFGIVASRFNHALVDRLVEGAIDCIVRHGGREEDITLVRVPGSWEIPVAAGELARKEDIDAVIAIGVLIRGATPHFDYIASEVSKGLADLSLELRKPITFGVITADTLEQAIERAGTKHGNKGWEAALSAIEMANLFKSLR

SEQ ID NO: 210 - protein, 153 aa, synthetic construct
QIYEGKLTAEGLRFGIVASRFNHALVDRLVEGAIDAIVRHGGREEDITLVRVPGSWEIPVAAGELARKENISAVIAIGVLIRGATPHFDYIASEVSKGLADLSLELRKPITFGVITADTCEQAIERAGTCHGNKGWEAALSAIEMANLFKSLR

SEQ ID NO: 211 - protein, 155 aa, synthetic construct
QIYEGKLTAEGLRFGIVASRFNHALVDRLVEGAIDAIVRHGGREEDITLVRVPGSWEIPVAAGELARKENISAVIAIGVLIRGATPHFDYIASEVSKGLADLSLELRKPITFGVITADTCCFEQAIERAGTCHGNKGWEAALSAIEMANLFKSLR

SEQ ID NO: 212 - protein, 155 aa, synthetic construct
QIYEGKLTAEGLRFGIVASRFNHALVDRLVEGAIDAIVRHGGREEDITLVRVPGSWEIPVAAGELARKENISAVIAIGVLIRGATPHFDYIASEVSKGLADLSLELRKPITFGVITADTCFCEQAIERAGTCHGNKGWEAALSAIEMANLFKSLR

SEQ ID NO: 213 - protein, 153 aa, synthetic construct
QIYEGCLTAEGLRFGIVASRFNHALVDRLVEGAIDAIVCHGGREEDITLVRVPGSWEIPVAAGELARKENISAVIAIGVLIRGATPHFDYIASEVSKGLADLSLELRKPITFGVITADTLEQAIERAGTKHGNKGWEAALSAIEMANLFKSLR

SEQ ID NO: 214 - protein, 154 aa, synthetic construct
QCYEGKLTAEGLRFGIVASRFNHALVDRLVEGAIDCIVRHGGREEDITCVRVPGSWEIPVAAGELARKEDIDAVIAIGVLCRGATPHFDYIASEVSKGLADLSLELRKPITFGVITADTLEQAIERAGTCGHGNKGWEAALSAIEMANLFKSLR

SEQ ID NO: 215 - protein, 154 aa, synthetic construct
QIYCGKLTAEGLRFGIVASRFNHALVDRLVEGAIDCIVRHGGREEDITLVCVPGSWEIPVAAGELARKEDIDAVIAIGVLCRGATPHFDYIASEVSKGLADLSLELRKPITFGVITADTLEQAIERAGTCGHGNKGWEAALSAIEMANLFKSLR

SEQ ID NO: 216 - protein, 154 aa, synthetic construct
QIYEGKLTAEGLRFGIVASRFNHALVDRLVEGAIDCIVRHGGREEDITLVRVPGSWEIPVAAGELARKEDIDAVIAIGVLCRGATPHFDYIASCVSKGLCDLSLELRKPITFGVITADTLEQAIERAGTCGHGNKGWEAALSAIEMANLFKSLR

SEQ ID NO: 217 - DNA, 1614 bp, synthetic construct
  source 1..1614: mol_type = other DNA
atggctccccaaaagctgaccatcagctggttcgccatcgtgctgctcgtgagccccctgatggccatgtgggagctggagaaggacgtgtacgtggtcgaggtggactggacccccgacgcccccggcgaaacagtgaacctgacctgcgacacccccgaggaagacgatatcacctggacaagcgaccagcggcacggcgtgatcggcagcggcaagaccctgaccatcaccgtgaaggagttcctggacgccggccagtacacctgccacaagggcggagaaacactgagccacagccacctgctgttgcacaagaaagagaacggcatctggagcaccgagatcctcaagaatttcaagaacaagaccttcctgaagtgcgaggcccccaactacagcggccggttcacctgcagctggctggtgcagcggaacatggacctgaagttcaacatcaagagctccagctctagccccgacagccgggccgtgacctgcggcatggccagcctgagcgccgagaaggtgaccctggaccagcgggactacgagaagtacagcgtgagctgccaggaggacgtgacctgccctaccgctgaggaaacactgcccatcgagctggccctggaggcccggcagcaaaacaagtacgagaactacagcaccagcttctttatccgggacatcattaagcccgacccccctaagaacctgcagatgaagcccctgaagaacagccaggtggaggtgagctgggagtaccccgacagctggagcaccccccacagctacttcagcctgaagttcttcgtgcggatccagcggaagaaggagaagatgaaggaaacagaggagggctgcaaccagaagggcgccttcctggtggaaaagacaagcacagaggtgcagtgcaagggcggcaacgtgtgcgtgcaggcccaggaccggtactataacagcagctgcagcaagtgggcctgcgtgccctgccgggtgcggagtgtgcctggcgtcggcgtgcccggcgtgggccgggtgatccccgtgagcggccccgcccggtgcctgagccagagccggaacctgctgaagaccacagacgacatggtgaagaccgcccgggagaagctgaagcactacagctgcaccgccgaggacatcgaccacgaggacatcacccgggaccagaccagcaccctgaagacctgcctccccctggagctgcacaagaacgagagctgcctggccacccgggaaacaagctctaccacacggggcagctgcctgcctcctcagaagaccagcctgatgatgaccctgtgcctgggcagcatctacgaggacctgaagatgtaccagaccgagttccaggccatcaacgccgctctgcagaaccacaaccaccagcagatcatcctggacaagggcatgctggtggccatcgacgagctgatgcagagcctgaaccacaacggcgaaacactgcggcagaagcccccagtgggcgaggccgacccctaccgggtgaagatgaagctgtgcatcctgctgcacgccttcagcacccgggtggtgaccatcaaccgggtgatgggctacctgagcagcgcc

SEQ ID NO: 218 - protein, 538 aa, synthetic construct
MCPQKLTISWFAIVLLVSPLMAMWELEKDVYVVEVDWTPDAPGETVNLTCDTPEEDDITWTSDQRHGVIGSGKTLTITVKEFLDAGQYTCHKGGETLSHSHLLLHKKENGIWSTEILKNFKNKTFLKCEAPNYSGRFTCSWLVQRNMDLKFNIKSSSSSPDSRAVTCGMASLSAEKVTLDQRDYEKYSVSCQEDVTCPTAEETLPIELALEARQQNKYENYSTSFFIRDIIKPDPPKNLQMKPLKNSQVEVSWEYPDSWSTPHSYFSLKFFVRIQRKKEKMKETEEGCNQKGAFLVEKTSTEVQCKGGNVCVQAQDRYYNSSCSKWACVPCRVRSVPGVGVPGVGRVIPVSGPARCLSQSRNLLKTTDDMVKTAREKLKHYSCTAEDIDHEDITRDQTSTLKTCLPLELHKNESCLATRETSSTTRGSCLPPQKTSLMMTLCLGSIYEDLKMYQTEFQAINAALQNHNHQQIILDKGMLVAIDELMQSLNHNGETLRQKPPVGEADPYRVKMKLCILLHAFSTRVVTINRVMGYLSSA

SEQ ID NO: 219 - DNA, 756 bp, synthetic construct
  source 1..756: mol_type = other DNA
atgggcgtgcacgagtgccccgcctggctgtggctgctgctgagcctgctgagcctgcccctgggcctgcccgtgctgggcgccagagtccaaccaacagaatctattgttagatttcctaatattacaaacttgtgcccttttggtgaagtttttaacgccaccagatttgcatccgtgtatgcttggaacaggaagagaatcagcaactgtgttgctgattattctgtcctatataattccgcatcattttccacttttaagtgttatggagtgtctcctactaaattaaatgatctctgctttactaatgtctatgcagattcatttgtaattagaggtgatgaagtcagacaaatcgctccagggcaaactggaaagattgctgattataattataaattaccagatgattttacaggctgcgttatagcttggaattctaacaatcttgattctaaggttggtggtaattataattacctgtatagattgtttaggaagtctaatctcaaaccttttgagagagatatttcaactgaaatctatcaggccggtagcacaccttgtaatggtgttgaaggttttaattgttactttcctttacaatcatatggtttccaacccactaatggtgttggttaccaaccatacagagtagtagtactttcttttgaacttctacatgcaccagcaactgtttgtggacctaaaaagtctactaatttggttaaaaacaaatgtgtcaatttctaa

SEQ ID NO: 220 - DNA, 732 bp, synthetic construct; identical to SEQ ID NO: 48
  source 1..732: mol_type = other DNA

SEQ ID NO: 221 - DNA, 726 bp, synthetic construct; identical to SEQ ID NO: 49
  source 1..726: mol_type = other DNA

SEQ ID NO: 222 - DNA, 756 bp, synthetic construct; identical to SEQ ID NO: 219
  source 1..756: mol_type = other DNA

SEQ ID NO: 223 - DNA, 732 bp, synthetic construct
  source 1..732: mol_type = other DNA
atgtaccggatgcagttgttgtcctgtatagctctttcccttgcattggtcactaattctagggttcagcctactgagtccatcgtgagattcccaaacatcacaaatctttgtcccttcggtgaggtattcaatgcgacacgatttgcctcagtgtacgcgtggaatcggaagaggatctccaattgcgtggccgactactccgtcttatacaactcagctagcttttcaacattcaagtgctatggcgtgagccctaccaagctcaatgacctgtgcttcactaatgtgtatgccgactcttttgtcattcgcggcgacgaggtccgacaaatcgcaccgggccaaaccggtaaaattgccgactacaactacaagctgcctgacgacttcaccggctgcgtaatcgcctggaacagcaataacctggatagcaaagtgggcggaaactacaactacctgtaccggctctttagaaagtccaacctgaaaccattcgagcgcgatatctcgaccgaaatctaccaggcgggcagcaccccctgtaatggtgtagaagggttcaattgttactttccactccagagttatgggttccagccgaccaatggcgtcggttatcaaccatatcgcgttgtggtgttgtcctttgagctgctacacgccccagctacagtgtgcgggccaaagaaaagcacaaatcttgtcaagaacaaatgcgttaacttttaa

SEQ ID NO: 224 - DNA, 3837 bp, synthetic construct
  source 1..3837: mol_type = other DNA
atgtaccggatgcagttgttgtcctgtatagctctttcccttgcattggtcactaattctgtgaacctcaccactcgcacacagctacctcccgcgtacactaattcatttaccaggggcgtctattatcctgataaggtgttccggagttcagtgttgcatagcactcaagacctgttcctgcccttcttctccaatgtcacttggtttcatgcgatacatgtgtctggtaccaacggaacgaagagatttgataaccccgtactgccattcaatgatggcgtatactttgcttcgactgaaaaatccaacatcatcaggggctggatttttggtacaacgcttgattccaagacccagtccctccttattgtgaacaatgcgaccaacgtcgtgataaaggtctgtgagtttcagttctgcaatgacccattccttggagtgtattatcacaagaacaacaaatcgtggatggagtcagagtttagggtgtacagcagcgctaacaactgtacatttgagtatgtgagtcagccgtttctgatggatcttgagggcaaacagggcaattttaagaatctcagagaatttgtgttcaagaacattgatggttactttaagatctatagcaaacatacgccaatcaacttggttcgtgatctgccacagggatttagcgcactggaacctctcgttgacttgcccataggtattaacatcaccaggttccagacgctcttggcattacaccgtagttatctgacccccggggactccagttccggatggactgcaggagccgctgcctactatgtgggttacctccagcccaggacctttcttttgaaatataacgagaacggcacaatcactgatgctgtggactgcgcattggatcctttgtcagagactaagtgcactctgaagtcattcacagtcgagaaaggcatttaccagacgtctaacttcagggttcagcctactgagtccatcgtgagattcccaaacatcacaaatctttgtcccttcggtgaggtattcaatgcgacacgatttgcctcagtgtacgcgtggaatcggaagaggatctccaattgcgtggccgactactccgtcttatacaactcagctagcttttcaacattcaagtgctatggcgtgagccctaccaagctcaatgacctgtgcttcactaatgtgtatgccgactcttttgtcattcgcggcgacgaggtccgacaaatcgcaccgggccaaaccggtaaaattgccgactacaactacaagctgcctgacgacttcaccggctgcgtaatcgcctggaacagcaataacctggatagcaaagtgggcggaaactacaactacctgtaccggctctttagaaagtccaacctgaaaccattcgagcgcgatatctcgaccgaaatctaccaggcgggcagcaccccctgtaatggtgtagaagggttcaattgttactttccactccagagttatgggttccagccgaccaatggcgtcggttatcaaccatatcgcgttgtggtgttgtcctttgagctgctacacgccccagctacagtgtgcgggccaaagaaaagcacaaatcttgtcaagaacaaatgcgttaactttaattttaatggactcacaggtacaggagtcctgaccgaatctaataagaagttcctgccctttcaacagttcggacgagacattgccgacaccaccgatgccgttcgggacccacagaccttagaaattctggatattactccatgtagttttgggggagtgtctgtcatcacccctggcactaatacatctaaccaggttgcagtcctctaccaggatgtgaactgtaccgaagtgccggtcgctattcacgcagaccagctcactcctacctggcgggtgtactccacaggctctaacgtgtttcagacacgtgcagggtgcctaatcggcgcagagcatgtaaataactcctatgagtgtgatatccccatcggagccgggatctgcgcttcctaccagacacaaacgaatagtcccggatctgcctcaagcgtggcatctcaatccattatagcatatacgatgtcccttggagctgaaaacagcgttgcgtattcaaacaatagtatcgctattccaaccaattttacaattagcgtgaccacagaaatactccctgtgagcatgaccaagaccagtgtagactgtactatgtacatctgcggcgacagtactgagtgtagcaatctgctgctacagtatgggtccttctgtactcagcttaatcgggctctcaccggaatcgctgtagagcaagataaaaacacacaagaagtgtttgctcaagtgaagcagatctataagacacctcccatcaaggatttcggtgggttcaactttagccagattctgcccgatccgtctaaaccgtccaagcgaagtttcatcgaagacctgcttttcaataaggtcacgctggcagatgctggatttatcaaacagtacggcgactgtctgggcgatatcgccgcaagagacttgatatgcgcccaaaagtttaatgggttaaccgtccttccaccgctcctgacagacgagatgatcgcccagtatacaagtgccttattagctgggaccattactagtggatggacatttggcgccggggctgctctacagatacccttcgccatgcagatggcttaccgcttcaacggaatcggagttacccagaacgtactgtacgaaaatcagaaactcatagctaatcaatttaactctgccatcgggaagattcaggattccctgtcgtctacagcgtccgccttggggaaactgcaagatgtagtgaaccagaacgcccaggccttaaatactctggtcaagcagttatcttcaaatttcggagcaattagctctgtgttgaacgatattctttccaggctggaccctccagaagccgaagtgcaaatagaccggctcatcacggggcgcttgcaaagcctgcaaacctatgtcacccagcaactgattcgagcagccgagatccgggccagtgctaatctggccgccacaaaaatgagcgagtgcgtcctcgggcagagcaaacgcgtagacttctgcggtaaaggctatcacctgatgagcttccctcagagcgcaccccacggggtggtcttcctccacgttacctacgtccctgcgcaggagaagaacttcactacggcccctgcaatttgccacgatggcaaggcccactttcccagggagggggtcttcgtttccaacgggactcattggttcgtgactcagagaaatttttatgaacctcagatcattaccactgataatacattcgtgtctggcaactgtgatgtggttattgggatagttaataatacggtatacgacccactccagcccgagctggactccttcaaagaggagctggacaagtactttaaaaatcacacctcacctgatgtggacctaggtgacatatctggcataaatgctagcgtggttaacattcagaaggaaatcgacagactcaacgaggtggccaaaaatctgaacgagagtctgatcgacctgcaggagttgggaaaatatgaacagtacatcaaatggccatggtacatctggctgggcttcatagcaggcctgatcgccatcgtcatggtgactattatgctgtgctgcatgacatcctgttgtagctgtttgaaggggtgttgctcctgcggctcatgctgcaaattcgacgaggacgattcagaacctgtgctgaagggagtgaagctgcattacacataa

SEQ ID NO: 225 - DNA, 3828 bp, synthetic construct
  source 1..3828: mol_type = other DNA
atgggagtcaaagttctgtttgccctgatctgcatcgctgtggccgaggccaaggttaatcttacaaccagaactcaattaccccctgcatacactaattctttcacacgtggtgtttattaccctgacaaagttttcagatcctcagttttacattcaactcaggacttgttcttacctttcttttccaatgttacttggttccatgctatacatgtctctgggaccaatggtactaagaggtttgataaccctgtcctaccatttaatgatggtgtttattttgcttccactgagaagtctaacataataagaggctggatttttggtactactttagattcgaagacccagtccctacttattgttaataacgctactaatgttgttattaaagtctgtgaatttcaattttgtaatgatccatttttgggtgtttattaccacaaaaacaacaaaagttggatggaaagtgagttcagagtttattctagtgcgaataattgcacttttgaatatgtctctcagccttttcttatggaccttgaaggaaaacagggtaatttcaaaaatcttagggaatttgtgtttaagaatattgatggttattttaaaatatattctaagcacacgcctattaatttagtgcgtgatctccctcagggtttttcggctttagaaccattggtagatttgccaataggtattaacatcactaggtttcaaactttacttgctttacatagaagttatttgactcctggtgattcttcttcaggttggacagctggtgctgcagcttattatgtgggttatcttcaacctaggacttttctattaaaatataatgaaaatggaaccattacagatgctgtagactgtgcacttgaccctctctcagaaacaaagtgtacgttgaaatccttcactgtagaaaaaggaatctatcaaacttctaactttagagtccaaccaacagaatctattgttagatttcctaatattacaaacttgtgcccttttggtgaagtttttaacgccaccagatttgcatccgtgtatgcttggaacaggaagagaatcagcaactgtgttgctgattattctgtcctatataattccgcatcattttccacttttaagtgttatggagtgtctcctactaaattaaatgatctctgctttactaatgtctatgcagattcatttgtaattagaggtgatgaagtcagacaaatcgctccagggcaaactggaaagattgctgattataattataaattaccagatgattttacaggctgcgttatagcttggaattctaacaatcttgattctaaggttggtggtaattataattacctgtatagattgtttaggaagtctaatctcaaaccttttgagagagatatttcaactgaaatctatcaggccggtagcacaccttgtaatggtgttgaaggttttaattgttactttcctttacaatcatatggtttccaacccactaatggtgttggttaccaaccatacagagtagtagtactttcttttgaacttctacatgcaccagcaactgtttgtggacctaaaaagtctactaatttggttaaaaacaaatgtgtcaatttcaacttcaatggtttaacaggcacaggtgttcttactgagtctaacaaaaagtttctgcctttccaacaatttggcagagacattgctgacactactgatgctgtccgtgatccacagacacttgagattcttgacattacaccatgttcttttggtggtgtcagtgttataacaccaggaacaaatacttctaaccaggttgctgttctttatcaggatgttaactgcacagaagtccctgttgctattcatgcagatcaacttactcctacttggcgtgtttattctacaggttctaatgtttttcaaacacgtgcaggctgtttaataggggctgaacatgtcaacaactcatatgagtgtgacatacccattggtgcaggtatatgcgctagttatcagactcagactaattctcctggcagcgccagcagtgtagctagtcaatccatcattgcctacactatgtcacttggtgcagaaaattcagttgcttactctaataactctattgccatacccacaaattttactattagtgttaccacagaaattctaccagtgtctatgaccaagacatcagtagattgtacaatgtacatttgtggtgattcaactgaatgcagcaatcttttgttgcaatatggcagtttttgtacacaattaaaccgtgctttaactggaatagctgttgaacaagacaaaaacacccaagaagtttttgcacaagtcaaacaaatttacaaaacaccaccaattaaagattttggtggttttaatttttcacaaatattaccagatccatcaaaaccaagcaagaggtcatttattgaagatctacttttcaacaaagtgacacttgcagatgctggcttcatcaaacaatatggtgattgccttggtgatattgctgctagggacctcatttgtgcacaaaagtttaacggccttactgttttgccacctttgctcacagatgaaatgattgctcaatacacttctgcactgttagcgggtacaatcacttctggttggacctttggtgcaggtgctgcattacaaataccatttgctatgcaaatggcttataggtttaatggtattggagttacacagaatgttctctatgagaaccaaaaattgattgccaaccaatttaatagtgctattggcaaaattcaagactcactttcttccacagcaagtgcacttggaaaacttcaagatgtggtcaaccaaaatgcacaagctttaaacacgcttgttaaacaacttagctccaattttggtgcaatttcaagtgttttaaatgatatcctttcacgtcttgaccctcccgaggctgaagtgcaaattgataggttgatcacaggcagacttcaaagtttgcagacatatgtgactcaacaattaattagagctgcagaaatcagagcttctgctaatcttgctgctactaaaatgtcagagtgtgtacttggacaatcaaaaagagttgatttttgtggaaagggctatcatcttatgtccttccctcagtcagcacctcatggtgtagtcttcttgcatgtgacttatgtccctgcacaagaaaagaacttcacaactgctcctgccatttgtcatgatggaaaagcacactttcctcgtgaaggtgtctttgtttcaaatggcacacactggtttgtaacacaaaggaatttttatgaaccacaaatcattactacagacaacacatttgtgtctggtaactgtgatgttgtaataggaattgtcaacaacacagtttatgatcctttgcaacctgaattagactcattcaaggaggagttagataaatattttaagaatcatacatcaccagatgttgatttaggtgacatctctggcattaatgcttcagttgtaaacattcaaaaagaaattgaccgcctcaatgaggttgccaagaatttaaatgaatctctcatcgatctccaagaacttggaaagtatgagcagtatataaaatggccatggtacatttggctaggttttatagctggcttgattgccatagtaatggtgacaattatgctttgctgtatgaccagttgctgtagttgtctcaagggctgttgttcttgtggatcctgctgcaaatttgatgaagacgactctgagccagtgctcaaaggagtcaaattacattacaca

SEQ ID NO: 226 - DNA, 798 bp, synthetic construct
  source 1..798: mol_type = other DNA
atgtttgtttttcttgttttattgccactagtctctagtcagtgtagagtccaaccaacagaatctattgttagatttcctaatattacaaacttgtgcccttttggtgaagtttttaacgccaccagatttgcatccgtgtatgcttggaacaggaagagaatcagcaactgtgttgctgattattctgtcctatataattccgcatcattttccacttttaagtgttatggagtgtctcctactaaattaaatgatctctgctttactaatgtctatgcagattcatttgtaattagaggtgatgaagtcagacaaatcgctccagggcaaactggaaagattgctgattataattataaattaccagatgattttacaggctgcgttatagcttggaattctaacaatcttgattctaaggttggtggtaattataattacctgtatagattgtttaggaagtctaatctcaaaccttttgagagagatatttcaactgaaatctatcaggccggtagcacaccttgtaatggtgttgaaggttttaattgttactttcctttacaatcatatggtttccaacccactaatggtgttggttaccaaccatacagagtagtagtactttcttttgaacttctacatgcaccagcaactgtttgtggacctaaaaagtctactaatttggttaaaaacaaatgtgtcaatttcgggtatatccctgaagcccccagggacggccaggcttacgtcagaaaggatggagagtgggtgctcttgagcaccttcctgtaa

SEQ ID NO: 227 - DNA, 3819 bp, synthetic construct; identical to SEQ ID NO: 54
  source 1..3819: mol_type = other DNA

SEQ ID NO: 228 - DNA, 3819 bp, synthetic construct
  source 1..3819: mol_type = other DNA
atgtttgtttttcttgttttattgccactagtctctagtcagtgtgttaatcttacaaccagaactcaattaccccctgcatacactaattctttcacacgtggtgtttattaccctgacaaagttttcagatcctcagttttacattcaactcaggatttgttcttacctttcttttccaatgttacttggttccatgctatacatgtctctgggaccaatggtactaagaggtttgataaccctgtcctaccatttaatgatggtgtttattttgcttccactgagaagtctaacataataagaggctggatctttggtactactttagattcgaagacccagtccctacttattgttaataacgctactaatgttgttattaaagtctgtgaatttcaattttgtaatgatccatttttgggtgtttattaccacaaaaacaacaaaagttggatggaaagtgagttcagagtttattctagtgcgaataattgcacttttgaatatgtctctcagccttttcttatggaccttgaaggaaaacagggtaatttcaaaaatcttagggaatttgtgtttaagaatattgatggttattttaaaatatattctaagcacacgcctattaatttagtgcgtgatctccctcagggtttttcggctttagaaccattggtagatttgccaataggtattaacatcactaggtttcaaactttacttgctttacatagaagttatttgactcctggtgattcttcttcaggttggacagctggtgctgcagcttattatgtgggttatcttcaacctaggacttttctattaaaatataatgaaaatggaaccattacagatgctgtagactgtgcacttgaccctctctcagaaacaaagtgtacgttgaaatccttcactgtagaaaaaggaatctatcaaacttctaactttagagtccaaccaacagaatctattgttagatttcctaatattacaaacttgtgcccttttggtgaagtttttaacgccaccagatttgcatccgtgtatgcttggaacaggaagagaatcagcaactgtgttgctgattattctgtcctatataattccgcatcattttccacttttaagtgttatggagtgtctcctactaaattaaatgatctctgctttactaatgtctatgcagattcatttgtaattagaggtgatgaagtcagacaaatcgctccagggcaaactggaaagattgctgattataattataaattaccagatgattttacaggctgcgttatagcttggaattctaacaatcttgattctaaggttggtggtaattataattacctgtatagattgtttaggaagtctaatctcaaaccttttgagagagatatttcaactgaaatctatcaggccggtagcacaccttgtaatggtgttgaaggttttaattgttactttcctttacaatcatatggtttccaacccactaatggtgttggttaccaaccatacagagtagtagtactttcttttgaacttctacatgcaccagcaactgtttgtggacctaaaaagtctactaatttggttaaaaacaaatgtgtcaatttcaacttcaatggtttaacaggcacaggtgttcttactgagtctaacaaaaagtttctgcctttccaacaatttggcagagacattgctgacactactgatgctgtccgtgatccacagacacttgagattcttgacattacaccatgttcttttggtggtgtcagtgttataacaccaggaacaaatacttctaaccaggttgctgttctttatcagggtgttaactgcacagaagtccctgttgctattcatgcagatcaacttactcctacttggcgtgtttattctacaggttctaatgtttttcaaacacgtgcaggctgtttaataggggctgaacatgtcaacaactcatatgagtgtgacatacccattggtgcaggtatatgcgctagttatcagactcagactaattctcctcggcgggcacgtagtgtagctagtcaatccatcattgcctacactatgtcacttggtgcagaaaattcagttgcttactctaataactctattgccatacccacaaattttactattagtgttaccacagaaattctaccagtgtctatgaccaagacatcagtagattgtacaatgtacatttgtggtgattcaactgaatgcagcaatcttttgttgcaatatggcagtttttgtacacaattaaaccgtgctttaactgggatagctgttgaacaagacaaaaacacccaagaagtttttgcacaagtcaaacaaatttacaaaacaccaccaattaaagattttggtggttttaatttttcacaaatattaccagatccatcaaaaccaagcaagaggtcatttattgaagatctacttttcaacaaagtgacacttgcagatgctggcttcatcaaacaatatggtgattgccttggtgatattgctgctagggacctcatttgtgcacaaaagtttaacggccttactgttttgccacctttgctcacagatgaaatgattgctcaatacacttctgcactgttagcgggtacaatcacttctggttggacctttggtgcaggtgctgcattacaaataccatttgctatgcaaatggcttataggtttaatggtattggagttacacagaatgttctctatgagaaccaaaaattgattgccaaccaatttaatagtgccattggcaaaattcaagactcactttcttccacagcaagtgcacttggaaaacttcaagatgtggtcaaccaaaatgcacaagctttaaacacgcttgttaaacaacttagctccaattttggtgcaatttcaagtgttttaaatgatatcctttcacgtcttgaccctcccgaggctgaagtgcaaattgataggttgatcacaggcagacttcaaagtttgcagacatatgtgactcaacaattaattagagctgcagaaatcagagcttctgctaatcttgctgctactaaaatgtcagagtgtgtacttggacaatcaaaaagagttgatttttgtggaaagggctatcatcttatgtccttccctcagtcagcacctcatggtgtagtcttcttgcatgtgacttatgtccctgcacaagaaaagaacttcacaactgctcctgccatttgtcatgatggaaaagcacactttcctcgtgaaggtgtctttgtttcaaatggcacacactggtttgtaacacaaaggaatttttatgaaccacaaatcattactacagacaacacatttgtgtctggtaactgtgatgttgtaataggaattgtcaacaacacagtttatgatcctttgcaacctgaattagactcattcaaggaggagttagataaatattttaagaatcatacatcaccagatgttgatttaggtgacatctctggcattaatgcttcagttgtaaacattcaaaaagaaattgaccgcctcaatgaggttgccaagaatttaaatgaatctctcatcgatctccaagaacttggaaagtatgagcagtatataaaatggccatggtacatttggctaggttttatagctggcttgattgccatagtaatggtgacaattatgctttgctgtatgaccagttgctgtagttgtctcaagggctgttgttcttgtggatcctgctgcaaatttgatgaagacgactctgagccagtgctcaaaggagtcaaattacattacaca

SEQ ID NO: 229 - DNA, 3819 bp, synthetic construct; identical to SEQ ID NO: 54
  source 1..3819: mol_type = other DNA

SEQ ID NO: 230 - DNA, 756 bp, synthetic construct; identical to SEQ ID NO: 219
  source 1..756: mol_type = other DNA

SEQ ID NO: 231 - DNA, 732 bp, synthetic construct; identical to SEQ ID NO: 48
  source 1..732: mol_type = other DNA

SEQ ID NO: 232 - DNA, 3819 bp, synthetic construct
  source 1..3819: mol_type = other DNA
atgttcgtgttcctggtgctgctccccctggtgagctcccagtgcgtcaactttaccaaccggacccagctgcccagtgcctataccaacagcttcacccgcggcgtctactaccccgacaaggtgttccggagcagcgtgctgcacagcacccaggacctcttcctccccttttttagcaacgtgacctggttccacgccatccacgtgagtggcaccaacggcaccaagcggttcgacaaccctgtgctccccttcaacgacggcgtgtacttcgctagcacagaaaaaagtaacatcattcggggctggatcttcggcaccacactcgacagtaagacccagagcctgctgattgtgaataacgccaccaacgtggtgatcaaggtgtgcgagttccagttctgcaactaccccttcctgggcgtgtactaccacaagaacaacaagagctggatggagagcgagttccgcgtgtatagctctgccaacaactgcacctttgagtacgtgagccagcccttcctgatggacctggagggcaagcagggcaatttcaaaaacctcagcgagttcgtgttcaagaacatcgacggctacttcaagatctacagcaagcacacccccatcaacctggtgcgggacctgccccagggctttagcgctctggagcccctggtggacctgcccatcggcatcaacatcacccgcttccaaaccctgttggccctgcaccggagctacctgacccctggcgatagcagtagtggctggacagccggagccgccgcctactacgtgggatacctgcagccccggaccttcctgctgaagtacaacgagaacggcacaatcacagacgctgtggactgcgccctggaccccctgagcgaaacaaagtgcaccctcaaaagtttcaccgtggagaagggcatctaccagaccagcaacttccgggtgcagcccaccgagagcatcgtgcggttccccaacatcaccaacctgtgccccttcggcgaggtgttcaacgccacccggttcgccagcgtgtacgcctggaaccggaagcggatcagcaactgcgtggccgactacagcgtgctgtataacagtgccagcttcagcaccttcaagtgctacggcgtgagccccaccaagctgaacgacctgtgcttcaccaacgtgtacgccgatagctttgtgatccggggcgacgaggtgcggcagatcgcccccggccagacaggcacaattgccgattacaattacaagctgcccgacgatttcaccggctgcgtgatcgcctggaacagcaacaacctggacagcaaggtgggcggaaactacaactacctgtaccggctgttccgcaaaagtaacctcaagcctttcgagcgggacatcagcaccgagatctaccaggccggcagtaccccttgcaacggcgtgaagggcttcaactgctacttccccctgcagagctacggcttccagcccacctacggcgtgggctaccagccctaccgggtggtggttctgagcttcgagctgctgcacgcccctgccaccgtgtgcggccccaagaaaagcaccaacctggtgaagaacaagtgcgtgaacttcaactttaacggactgacaggcaccggcgtgctgaccgagagcaacaagaagttcctgcccttccagcaattcggccgggatattgccgacaccaccgacgccgtgcgggacccccagaccctggagatcctggacatcacaccctgtagcttcggcggcgtgagcgtgatcacccccggcaccaacaccagcaaccaggtggccgtgctctaccaaggcgtgaactgcaccgaggtgcccgtggccatccacgccgaccagctgacccccacctggcgggtgtacagcaccggcagcaacgtgttccagacccgggccggctgcctgatcggcgccgagtacgtgaataacagctacgagtgcgacatccccatcggagccggaatctgcgccagctaccagacccagaccaacagcccccggagagcccggagcgtggccagccagagcattattgcctacaccatgagcctgggcgccgagaacagcgtggcctacagcaacaatagtattgccatccccaccaacttcaccatcagcgtgaccactgaaatcctccccgtgagcatgaccaagaccagcgtggactgcaccatgtacatctgcggcgacagcaccgagtgcagcaacctgctcctgcagtacggcagcttctgcacccagctgaaccgggccctgaccggaattgccgtggagcaggacaagaacacccaggaggtgttcgcccaggtgaagcagatctacaagacacctcctatcaaggacttcggcgggttcaacttcagccagatcctgcccgaccccagcaagcccagcaagcggagcttcatcgaggacctgttgttcaacaaggtgaccctggccgacgccggcttcatcaagcagtacggcgactgtctgggagatattgccgcacgggacctgatctgcgcccagaagttcaacggcctgaccgtgctgcctcctctgctgaccgacgagatgatcgcccagtacacaagcgctctgctcgccggcaccatcaccagcggctggaccttcggcgccggcgctgccctgcagatccccttcgccatgcagatggcctaccggttcaacggcatcggcgtgacccagaacgtgctgtacgagaaccagaagctgatcgccaaccagttcaacagcgccatcggcaagatccaggacagcctgagctccaccgccagcgccctgggcaagctgcaggacgtggtgaaccagaacgcccaggccctgaacaccctggtgaagcagctgagcagcaacttcggcgccatcagctctgtgctgaacgacatcctgagccggctggaccccccagaggccgaggtgcaaatcgatcggctcatcaccggccggctgcagagcctgcagacctacgtgacacagcagctgatccgggccgccgagatccgggccagcgccaacctggccgctatcaagatgagcgagtgcgtgctgggccagagcaagcgggtggacttctgcggcaagggctaccacctgatgagcttcccccagagcgccccccacggcgtggtgttcctgcacgtgacctacgtgcccgcccaggagaagaacttcaccaccgcccccgccatctgccacgacggcaaggcccacttcccccgggagggcgtgttcgtgagcaacggcacccactggttcgtgacccagcggaacttctacgagccccagatcataaccaccgacaacaccttcgtgagcggcaactgcgacgtggtcatcggcatcgtgaacaacaccgtgtacgaccccctgcagcccgagctggacagcttcaaggaggaactggacaagtacttcaagaaccacaccagccccgacgtggacctgggcgacatcagcggcatcaacgccagcttcgtgaacatccagaaggagatcgaccggctgaacgaggtggccaagaacctgaacgagagcctgatcgacctgcaggagctgggcaagtacgagcagtacatcaagtggccctggtacatctggctgggctttattgccggcctgatcgccatcgtgatggtgaccatcatgctgtgctgtatgacaagctgttgcagttgcctgaagggctgctgcagctgcggcagctgctgcaagttcgacgaggacgacagcgagcccgtgctgaagggcgtgaagctgcactacacc

SEQ ID NO: 233 - DNA, 3819 bp, synthetic construct
  source 1..3819: mol_type = other DNA
atgttcgtgttcctggtgctgctccccctggtgagctcccagtgcgtcaacctgaccacacggacccagctgccccccgcctataccaacagcttcacccgcggcgtctactaccccgacaaggtgttccggagcagcgtgctgcacagcacccaggacctcttcctccccttttttagcaacgtgacctggttccacgccatccacgtgagtggcaccaacggcaccaagcggttcgccaaccctgtgctccccttcaacgacggcgtgtacttcgctagcacagaaaaaagtaacatcattcggggctggatcttcggcaccacactggatagcaaaacccagagcctgctgattgtgaataacgccaccaacgtggtgatcaaggtgtgcgagttccagttctgcaacgaccccttcctgggcgtgtactaccacaagaacaacaagagctggatggagagcgagttccgcgtgtatagctctgccaacaactgcaccttcgagtacgtgagccagcccttcctgatggacctggagggcaagcagggcaatttcaaaaacctgcgggagttcgtgttcaagaacatcgacggctacttcaagatctacagcaagcacacccccatcaacctggtgcggggcctgccccagggctttagcgctctggagcccctggtggacctgcccatcggcatcaacatcacccgcttccaaaccctgttggccctgcaccggagctacctgacccctggcgatagcagtagtggctggacagccggagccgccgcctactacgtgggatacctgcagccccggaccttcctgctgaagtacaacgagaacggcacaatcacagacgccgtggactgcgccctggaccccctgagcgaaacaaagtgcaccctcaaaagtttcaccgtggagaagggcatctaccagaccagcaacttccgggtgcagcccaccgagagcatcgtgcggttccccaacatcaccaacctgtgccccttcggcgaggtgttcaacgccacccggttcgccagcgtgtacgcctggaaccggaagcggatcagcaactgcgtggccgactacagcgtgctgtataacagtgccagcttcagcaccttcaagtgctacggcgtgagccccaccaagctgaacgacctgtgcttcaccaacgtgtacgccgacagcttcgtgatccggggcgacgaggtgcggcagatcgcccccggccagaccggcaatattgctgactataactataagctgcccgacgatttcaccggctgcgtgatcgcctggaacagcaacaacctggacagcaaggtgggcggaaactacaactacctgtaccggctgttccgcaaaagtaacctcaagcctttcgagcgggacatcagcaccgagatctaccaggccggcagtaccccttgcaacggcgtgaagggcttcaactgctacttccccctgcagagctacggcttccagcccacctacggcgtgggctaccagccctaccgggtggtggttctgagcttcgagctgctgcacgcccctgccaccgtgtgcggccccaagaaaagcaccaacctggtgaagaacaagtgcgtgaacttcaactttaacggactgacaggcaccggcgtgctgaccgagagcaacaagaagttcctgcccttccagcaattcggccgggatattgccgacaccactgacgccgtgcgggacccccagaccctggagatcctggacatcacaccctgtagcttcggcggcgtgagcgtgatcacccccggcaccaacaccagcaaccaggtggccgtgctctaccaaggcgtgaactgcaccgaggtgcccgtggccatccacgccgaccagctgacccccacctggcgggtgtacagcaccggcagcaacgtgttccagacccgggccggctgcctgatcggcgccgagcacgtgaataacagctacgagtgcgacatccccatcggagccggaatctgcgccagctaccagacccagaccaacagcccccggagagcccggagcgtggccagccagagcattattgcctacaccatgagcctgggcgtggagaacagcgtggcctacagcaacaatagtattgccatccccaccaacttcaccatcagcgtgaccaccgaaatcctccccgtgagcatgaccaagaccagcgtggactgcaccatgtacatctgcggcgacagcaccgagtgcagcaacctgctcctgcagtacggcagcttctgcacccagctgaaccgggccctgaccggaattgccgtggagcaggacaagaacacccaggaggtgttcgcccaggtgaagcagatctacaagacacctcccatcaaggacttcggcgggttcaacttcagccagatcctgcccgaccccagcaagcccagcaagcggagcttcatcgaggacctgttgttcaacaaggtgaccctggccgacgccggcttcatcaagcagtacggcgactgtctgggagatattgccgcacgggacctgatctgcgcccagaagttcaacggcctgaccgtgctgcccccactgctgaccgacgagatgatcgcccagtacacaagcgctctgctcgccggcaccatcaccagcggctggaccttcggcgccggcgctgccctgcagatccccttcgccatgcagatggcctaccggttcaacggcatcggcgtgacccagaacgtgctgtacgagaaccagaagctgatcgccaaccagttcaacagcgccatcggcaagatccaggacagcctgagctccaccgccagcgccctgggcaagctgcaggacgtggtgaaccagaacgcccaggccctgaacaccctggtgaagcagctgagcagcaacttcggcgccatcagctctgtgctgaacgacatcctgagccggctggatcctcctgaggccgaggtgcaaatcgatcggctcatcaccggccggctgcagagcctgcagacctacgtgacacagcagctgatccgggccgccgagatccgggccagcgccaacctggccgctaccaagatgagcgagtgcgtgctgggccagagcaagcgggtggacttctgcggcaagggctaccacctgatgagcttcccccagagcgccccccacggcgtggtgttcctgcacgtgacctacgtgcccgcccaggagaagaacttcaccaccgcccccgccatctgccacgacggcaaggcccacttcccccgggagggcgtgttcgtgagcaacggcacccactggttcgtgacccagcggaacttctacgagccccagatcataaccacagacaacaccttcgtgagcggcaactgcgacgtggtcatcggcatcgtgaacaacaccgtgtacgaccccctgcagcccgagctggacagcttcaaggaggaactggacaagtacttcaagaaccacaccagccccgacgtggacctgggcgacatcagcggcatcaacgccagcgtggtgaacatccagaaggagatcgaccggctgaacgaggtggccaagaacctgaacgagagcctgatcgacctgcaggagctgggcaagtacgagcagtacatcaagtggccctggtacatctggctgggctttattgccggcctgatcgccatcgtgatggtgaccatcatgctgtgctgtatgacaagctgttgcagttgcctgaagggctgctgcagctgcggcagctgctgcaagttcgacgaggacgacagcgagcccgtgctgaagggcgtgaagctgcactacacc

SEQ ID NO: 234 - DNA, 3810 bp, synthetic construct
  source 1..3810: mol_type = other DNA
atgttcgtgttcctggtgctgctccccctggtgagctcccagtgcgtcaacctgaccacacggacccagctgccccccgcctataccaacagcttcacccggggcgtgtactatcccgacaaggtgttccggagcagcgtgctgcacagcacccaggacctcttcctccccttttttagcaacgtgacctggttccacgctatcagtggcaccaacggcaccaagcggttcgacaaccctgtgctccccttcaacgacggcgtgtacttcgctagcacagaaaaaagtaacatcattcggggctggatcttcggcaccacactggatagcaaaacccagagcctgctgattgtgaataacgccaccaacgtggtgatcaaggtgtgcgagttccagttctgcaacgaccccttcctgggcgtgtaccacaagaacaacaagagctggatggagagcgagttccgcgtgtatagctctgccaacaactgcaccttcgagtacgtgagccagcccttcctgatggacctggagggcaagcagggcaatttcaaaaacctgcgggagttcgtgttcaagaacatcgacggctacttcaagatctacagcaagcacacccccatcaacctggtgcgggacctgccccagggctttagcgctctggagcccctggtggacctgcccatcggcatcaacatcacccgcttccaaaccctgttggccctgcaccggagctacctgacccctggcgatagcagtagtggctggacagccggagccgccgcctactacgtgggatacctgcagccccggaccttcctgctgaagtacaacgagaacggcacaatcacagacgccgtggactgcgccctggaccccctgagcgaaacaaagtgcaccctcaaaagtttcaccgtggagaagggcatctaccagaccagcaacttccgggtgcagcccaccgagagcatcgtgcggttccccaacatcaccaacctgtgccccttcggcgaggtgttcaacgccacccggttcgccagcgtgtacgcctggaaccggaagcggatcagcaactgcgtggccgactacagcgtgctgtataacagtgccagcttcagcaccttcaagtgctacggcgtgagccccaccaagctgaacgacctgtgcttcaccaacgtgtacgccgacagcttcgtgatccggggcgacgaggtgcggcagatcgcccccggccagaccggcaagatcgccgattacaattacaagctgcccgacgatttcaccggctgcgtgatcgcctggaacagcaacaacctggacagcaaggtgggcggaaactacaactacctgtaccggctgttccgcaaaagtaacctgaagcccttcgagcgggacatcagcaccgagatctaccaggccggcagtaccccttgcaacggcgtggagggcttcaactgctacttccccctgcagagctacggcttccagcccacctacggcgtgggctaccagccctaccgggtggtggttctgagcttcgagctgctgcacgcccctgccaccgtgtgcggccccaagaaaagcaccaacctggtgaagaacaagtgcgtgaacttcaactttaacggactgacaggcaccggcgtgctgaccgagagcaacaagaagttcctgcccttccagcaattcggccgggacatcgacgacaccactgacgccgtgcgggacccccagaccctggagatcctggacatcacaccctgtagcttcggcggcgtgagcgtgatcacccccggcaccaacaccagcaaccaggtggccgtgctctaccaaggcgtgaactgcaccgaggtgcccgtggccatccacgccgaccagctgacccccacctggcgggtgtacagcaccggcagcaacgtgttccagacccgggccggctgcctgatcggcgccgagcacgtgaataacagctacgagtgcgacatccccatcggagccggaatctgcgccagctaccagacccagaccaacagccaccggagagcccggagcgtggccagccagagcattattgcctacaccatgagcctgggcgccgagaacagcgtggcctacagcaacaatagtattgccatccccaccaacttcaccatcagcgtgaccaccgaaatcctccccgtgagcatgaccaagaccagcgtggactgcaccatgtacatctgcggcgacagcaccgagtgcagcaacctgctcctgcagtacggcagcttctgcatccagctgaaccgggccctgaccggaattgccgtggagcaggacaagaacacccaggaggtgttcgcccaggtgaagcagatctacaagacacctcccatcaaggacttcggcgggttcaacttcagccagatcctgcccgaccccagcaagcccagcaagcggagcttcatcgaggacctgttgttcaacaaggtgaccctggccgacgccggcttcatcaagcagtacggcgactgtctgggagatattgccgcacgggacctgatctgcgcccagaagttcaacggcctgaccgtgctgcccccactgctgaccgacgagatgatcgcccagtacacaagcgctctgctcgccggcaccatcaccagcggctggaccttcggcgccggcgctgccctgcagatccccttcgccatgcagatggcctaccggttcaacggcatcggcgtgacccagaacgtgctgtacgagaaccagaagctgatcgccaaccagttcaacagcgccatcggcaagatccaggacagcctgagctccaccgccagcgccctgggcaagctgcaggacgtggtgaaccagaacgcccaggccctgaacaccctggtgaagcagctgagcagcaacttcggcgccatcagctctgtgctgaacgacatcctggcccggctggatcctcctgaggccgaggtgcaaatcgatcggctcatcaccggccggctgcagagcctgcagacctacgtgacacagcagctgatccgggccgccgagatccgggccagcgccaacctggccgctaccaagatgagcgagtgcgtgctgggccagagcaagcgggtggacttctgcggcaagggctaccacctgatgagcttcccccagagcgccccccacggcgtggtgttcctgcacgtgacctacgtgcccgcccaggagaagaacttcaccaccgcccccgccatctgccacgacggcaaggcccacttcccccgggagggcgtgttcgtgagcaacggcacccactggttcgtgacccagcggaacttctacgagccccagatcataaccacacacaacaccttcgtgagcggcaactgcgacgtggtcatcggcatcgtgaacaacaccgtgtacgaccccctgcagcccgagctggacagcttcaaggaggaactggacaagtacttcaagaaccacaccagccccgacgtggacctgggcgacatcagcggcatcaacgccagcgtggtgaacatccagaaggagatcgaccggctgaacgaggtggccaagaacctgaacgagagcctgatcgacctgcaggagctgggcaagtacgagcagtacatcaagtggccctggtacatctggctgggctttattgccggcctgatcgccatcgtgatggtgaccatcatgctgtgctgtatgacaagctgttgcagttgcctgaagggctgctgcagctgcggcagctgctgcaagttcgacgaggacgacagcgagcccgtgctgaagggcgtgaagctgcactacacc

SEQ ID NO: 235 - DNA, 723 bp, synthetic construct
  source 1..723: mol_type = other DNA
atgggcgtcaaggtcctgttcgccctgatctgtattgccgtggccgaggccaagcgggtgcagcccaccgagagcatcgtgcggttccccaacatcaccaacctgtgccccttcggcgaggtgttcaacgccacccggttcgccagcgtgtacgcctggaaccggaagcggatcagcaactgcgtggccgactacagcgtgctgtacaacagcgccagcttcagcaccttcaagtgctacggcgtgagccccaccaagctgaacgacctgtgcttcaccaacgtgtacgccgacagcttcgtgatccggggcgacgaggtgcggcagatcgcccccggccagacaggcaacattgctgattacaattacaagctgcccgacgatttcaccggctgcgtgatcgcctggaacagcaacaatctggacagcaaggtgggcggaaactacaactacctgtaccggctgttccgcaaaagtaacctcaagcctttcgagcgggacatcagcaccgagatctaccaggccggcagcaccccctgcaacggcgtgaagggcttcaactgctacttccccctgcagagctacggcttccagcccacctacggcgtgggctaccagccctaccgggtggtcgtgctgagcttcgagctgctccacgcccccgccaccgtgtgcggccccaagaaaagcaccaacctggtgaagaacaagtgcgtgaacttc

SEQ ID NO: 236 - DNA, 3810 bp, synthetic construct
  source 1..3810: mol_type = other DNA
atgttcgtgttcctggtgctgctccccctggtgagctcccagtgcgtcaactttaccacccggacccagctgccccccgcctataccaacagcttcacccgcggcgtctactaccccgacaaggtgttccggagcagcgtgctgcacagcacccaggacctcttcctccccttttttagcaacgtgacctggttccacgccatccacgtgagtggcaccaacggcaccaagcggttcgccaaccctgtgctccccttcaacgacggcgtgtacttcgctagcacagaaaaaagtaacatcattcggggctggatcttcggcaccacactggatagcaaaacccagagcctgctgattgtgaataacgccaccaacgtggtgatcaaggtgtgcgagttccagttctgcaacgaccccttcctgggcgtgtactaccacaagaacaacaagagctggatggagagcgagttccgcgtgtatagctctgccaacaactgcaccttcgagtacgtgagccagcccttcctgatggacctggagggcaagcagggcaatttcaaaaacctgcgggagttcgtgttcaagaacatcgacggctacttcaagatctacagcaagcacacccccatcaacctggtgcggggcctgccccagggctttagcgctctggagcccctggtggacctgcccatcggcatcaacatcacccgcttccaaaccctgcacatcagctacctgacccctggcgatagcagtagtggctggacagccggagccgccgcctactacgtgggatacctgcagccccggaccttcctgttgaagtacaacgagaacggcacaatcacagacgccgtggactgcgccctggaccccctgagcgaaacaaagtgcaccctcaaaagtttcaccgtggagaagggcatctaccagaccagcaacttccgggtgcagcccaccgagagcatcgtgcggttccccaacatcaccaacctgtgccccttcggcgaggtgttcaacgccacccggttcgccagcgtgtacgcctggaaccggaagcggatcagcaactgcgtggccgactacagcgtgctgtataacagtgccagcttcagcaccttcaagtgctacggcgtgagccccaccaagctgaacgacctgtgcttcaccaacgtgtacgccgacagcttcgtgatccggggcgacgaggtgcggcagatcgcccccggccagaccggcaatattgctgactataactataagctgcccgacgatttcaccggctgcgtgatcgcctggaacagcaacaacctggacagcaaggtgggcggaaactacaactacctgtaccggctgttccgcaaaagtaacctcaagcctttcgagcgggacatcagcaccgagatctaccaggccggcagtaccccttgcaacggcgtgaagggcttcaactgctacttccccctgcagagctacggcttccagcccacctacggcgtgggctaccagccctaccgggtggtggttctgagcttcgagctgctgcacgcccctgccaccgtgtgcggccccaagaaaagcaccaacctggtgaagaacaagtgcgtgaacttcaactttaacggactgacaggcaccggcgtgctgaccgagagcaacaagaagttcctgcccttccagcaattcggccgggatattgccgacaccactgacgccgtgcgggacccccagaccctggagatcctggacatcacaccctgtagcttcggcggcgtgagcgtgatcacccccggcaccaacaccagcaaccaggtggccgtgctctaccaaggcgtgaactgcaccgaggtgcccgtggccatccacgccgaccagctgacccccacctggcgggtgtacagcaccggcagcaacgtgttccagacccgggccggctgcctgatcggcgccgagcacgtgaataacagctacgagtgcgacatccccatcggagccggaatctgcgccagctaccagacccagaccaacagcccccggagagcccggagcgtggccagccagagcattattgcctacaccatgagcctgggcgtggagaacagcgtggcctacagcaacaatagtattgccatccccaccaacttcaccatcagcgtgaccaccgaaatcctccccgtgagcatgaccaagaccagcgtggactgcaccatgtacatctgcggcgacagcaccgagtgcagcaacctgctgctccagtacggcagcttctgcacccagctgaaccgggccctgaccggaattgccgtggagcaggacaagaacacccaggaggtgttcgcccaggtgaagcagatctacaagacacctcccatcaaggacttcggcgggttcaacttcagccagatcctgcccgaccccagcaagcccagcaagcggagcttcatcgaggacctgctgttcaacaaggtgaccctggccgacgccggcttcatcaagcagtacggcgactgtctgggagatattgccgcacgggacctgatctgcgcccagaagttcaacggcctgaccgtgctgcccccactgttgaccgacgagatgatcgcccagtacacaagcgctctgctggccggcaccatcaccagcggctggaccttcggcgccggcgctgccctgcagatccccttcgccatgcagatggcctaccggttcaacggcatcggcgtgacccagaacgtgctgtacgagaaccagaagctgatcgccaaccagttcaacagcgccatcggcaagatccaggacagcctgagctccaccgccagcgccctgggcaagctgcaggacgtggtgaaccagaacgcccaggccctgaacaccctggtgaagcagctgagcagcaacttcggcgccatcagctctgtgctgaacgacatcctgagccggctggatcctcctgaggccgaggtgcaaatcgatcggctcatcaccggccggctgcagagcctgcagacctacgtgacacagcagctgatccgggccgccgagatccgggccagcgccaacctggccgctaccaagatgagcgagtgcgtgctgggccagagcaagcgggtggacttctgcggcaagggctaccacctgatgagcttcccccagagcgccccccacggcgtggtgttcctgcacgtgacctacgtgcccgcccaggagaagaacttcaccaccgcccccgccatctgccacgacggcaaggcccacttcccccgggagggcgtgttcgtgagcaacggcacccactggttcgtgacccagcggaacttctacgagccccagatcataaccacagacaacaccttcgtgagcggcaactgcgacgtggtcatcggcatcgtgaacaacaccgtgtacgaccccctgcagcccgagctggacagcttcaaggaggaactggacaagtacttcaagaaccacaccagccccgacgtggacctgggcgacatcagcggcatcaacgccagcgtggtgaacatccagaaggagatcgaccggctgaacgaggtggccaagaacctgaacgagagcctgatcgacctgcaggagctgggcaagtacgagcagtacatcaagtggccctggtacatctggctgggctttattgccggcctgatcgccatcgtgatggtgaccatcatgctgtgctgtatgacaagctgttgcagttgcctgaagggctgctgcagctgcggcagctgctgcaagttcgacgaggacgacagcgagcccgtgctgaagggcgtgaagctgcactacacc

SEQ ID NO: 237 - DNA, 3819 bp, synthetic construct
  source 1..3819: mol_type = other DNA
atgttcgtgttcctggtgctgctgcctctggtgtccagccagtgtgtgaacctgaccaccagaacacagctgcctccagcctacaccaacagctttaccagaggcgtgtactaccccgacaaggtgttcagatccagcgtgctgcactctacccaggacctgttcctgcctttcttcagcaacgtgacctggttccacgccatccacgtgtccggcaccaatggcaccaagagattcgacaaccccgtgctgcccttcaacgacggggtgtactttgccagcaccgagaagtccaacatcatcagaggctggatcttcggcaccacactggacagcaagacccagagcctgctgatcgtgaacaacgccaccaacgtggtcatcaaagtgtgcgagttccagttctgcaacgaccccttcctgggcgtctactaccacaagaacaacaagagctggatggaaagcgagttccgggtgtacagcagcgccaacaactgcaccttcgagtacgtgtcccagcctttcctgatggacctggaaggcaagcagggcaacttcaagaacctgcgcgagttcgtgtttaagaacatcgacggctacttcaagatctacagcaagcacacccctatcaacctcgtgcgggatctgcctcagggcttctctgctctggaacccctggtggatctgcccatcggcatcaacatcacccggtttcagacactgctggccctgcacagaagctacctgacacctggcgatagcagcagcggatggacagctggtgccgccgcttactatgtgggctacctgcagcctagaaccttcctgctgaagtacaacgagaacggcaccatcaccgacgccgtggattgtgctctggatcctctgagcgagacaaagtgcaccctgaagtccttcaccgtggaaaagggcatctaccagaccagcaacttccgggtgcagcccaccgaatccatcgtgcggttccccaatatcaccaatctgtgccccttcggcgaggtgttcaatgccaccagattcgcctctgtgtacgcctggaaccggaagcggatcagcaattgcgtggccgactactccgtgctgtacaactccgccagcttcagcaccttcaagtgctacggcgtgtcccctaccaagctgaacgacctgtgcttcacaaacgtgtacgccgacagcttcgtgatccggggagatgaagtgcggcagattgcccctggacagacaggcaagatcgccgactacaactacaagctgcccgacgacttcaccggctgtgtgattgcctggaacagcaacaacctggactccaaagtcggcggcaactacaattacctgtaccggctgttccggaagtccaatctgaagcccttcgagcgggacatctccaccgagatctatcaggccggcagcaccccttgtaacggcgtggaaggcttcaactgctacttcccactgcagtcctacggctttcagcccacaaatggcgtgggctatcagccctacagagtggtggtgctgagcttcgaactgctgcatgcccctgccacagtgtgcggccctaagaaaagcaccaatctcgtgaagaacaaatgcgtgaacttcaacttcaacggcctgaccggcaccggcgtgctgacagagagcaacaagaagttcctgccattccagcagtttggccgggatatcgccgataccacagacgccgttagagatccccagacactggaaatcctggacatcaccccttgcagcttcggcggagtgtctgtgatcacccctggcaccaacaccagcaatcaggtggcagtgctgtaccaggacgtgaactgtaccgaagtgcccgtggccattcacgccgatcagctgacacctacatggcgggtgtactccaccggcagcaatgtgtttcagaccagagccggctgtctgatcggagccgagcacgtgaacaatagctacgagtgcgacatccccatcggcgctggaatctgcgccagctaccagacacagacaaacagccctcggagagccagaagcgtggccagccagagcatcattgcctacacaatgtctctgggcgccgagaacagcgtggcctactccaacaactctatcgctatccccaccaacttcaccatcagcgtgaccacagagatcctgcctgtgtccatgaccaagaccagcgtggactgcaccatgtacatctgcggcgattccaccgagtgctccaacctgctgctgcagtacggcagcttctgcacccagctgaatagagccctgacagggatcgccgtggaacaggacaagaacacccaagaggtgttcgcccaagtgaagcagatctacaagacccctcctatcaaggacttcggcggcttcaatttcagccagattctgcccgatcctagcaagcccagcaagcggagcttcatcgaggacctgctgttcaacaaagtgacactggccgacgccggcttcatcaagcagtatggcgattgtctgggcgacattgccgccagggatctgatttgcgcccagaagtttaacggactgacagtgctgcctcctctgctgaccgatgagatgatcgcccagtacacatctgccctgctggccggcacaatcacaagcggctggacatttggagcaggcgccgctctgcagatcccctttgctatgcagatggcctaccggttcaacggcatcggagtgacccagaatgtgctgtacgagaaccagaagctgatcgccaaccagttcaacagcgccatcggcaagatccaggacagcctgagcagcacagcaagcgccctgggaaagctgcaggacgtggtcaaccagaatgcccaggcactgaacaccctggtcaagcagctgtcctccaacttcggcgccatcagctctgtgctgaacgatatcctgagcagactggaccctcctgaggccgaggtgcagatcgacagactgatcacaggcagactgcagagcctccagacatacgtgacccagcagctgatcagagccgccgagattagagcctctgccaatctggccgccaccaagatgtctgagtgtgtgctgggccagagcaagagagtggacttttgcggcaagggctaccacctgatgagcttccctcagtctgcccctcacggcgtggtgtttctgcacgtgacatatgtgcccgctcaagagaagaatttcaccaccgctccagccatctgccacgacggcaaagcccactttcctagagaaggcgtgttcgtgtccaacggcacccattggttcgtgacacagcggaacttctacgagccccagatcatcaccaccgacaacaccttcgtgtctggcaactgcgacgtcgtgatcggcattgtgaacaataccgtgtacgaccctctgcagcccgagctggacagcttcaaagaggaactggacaagtactttaagaaccacacaagccccgacgtggacctgggcgatatcagcggaatcaatgccagcgtcgtgaacatccagaaagagatcgaccggctgaacgaggtggccaagaatctgaacgagagcctgatcgacctgcaagaactggggaagtacgagcagtacatcaagtggccctggtacatctggctgggctttatcgccggactgattgccatcgtgatggtcacaatcatgctgtgttgcatgaccagctgctgtagctgcctgaagggctgttgtagctgtggcagctgctgcaagttcgacgaggacgattctgagcccgtgctgaagggcgtgaaactgcactacaca

SEQ ID NO: 238 - DNA, 3819 bp, synthetic construct; identical to SEQ ID NO: 54
  source 1..3819: mol_type = other DNA

SEQ ID NO: 239 - DNA, 3819 bp, synthetic construct
  source 1..3819: mol_type = other DNA
atgttcgtgttcctggtgctgctgcctctggtgtccagccagtgtgtgaacctgaccaccagaacacagctgcctccagcctacaccaacagctttaccagaggcgtgtactaccccgacaaggtgttcagatccagcgtgctgcactctacccaggacctgttcctgcctttcttcagcaacgtgacctggttccacgccatccacgtgtccggcaccaacggcaccaagagattcgacaaccccgtgctgcccttcaacgacggggtgtactttgccagcaccgagaagtccaacatcatcagaggctggatcttcggcaccacactggacagcaagacccagagcctgctgatcgtgaacaacgccaccaacgtggtcatcaaagtgtgcgagttccagttctgcaacgaccccttcctgggcgtctactaccacaagaacaacaagagctggatggaaagcgagttccgggtgtacagcagcgccaacaactgcaccttcgagtacgtgtcccagcctttcctgatggacctggaaggcaagcagggcaacttcaagaacctgcgcgagttcgtgtttaagaacatcgacggctacttcaagatctacagcaagcacacccctatcaacctcgtgcgggatctgcctcagggcttctctgctctggaacccctggtggatctgcccatcggcatcaacatcacccggtttcagacactgctggccctgcacagaagctacctgacacctggcgatagcagcagcggctggacagctggtgccgccgcttactacgtgggctacctgcagcctagaaccttcctgctgaagtacaacgagaacggcaccatcaccgacgccgtggattgtgctctggatcctctgagcgagacaaagtgcaccctgaagtccttcaccgtggaaaagggcatctaccagaccagcaacttccgggtgcagcccaccgaatccatcgtgcggttccccaatatcaccaatctgtgccccttcggcgaggtgttcaacgccaccagattcgcctctgtgtacgcctggaaccggaagcggatcagcaattgcgtggccgactactccgtgctgtacaactccgccagcttcagcaccttcaagtgctacggcgtgtcccctaccaagctgaacgacctgtgcttcacaaacgtgtacgccgacagcttcgtgatccggggagacgaagtgcggcagattgcccctggacagacaggcaagatcgccgactacaactacaagctgcccgacgacttcaccggctgtgtgattgcctggaacagcaacaacctggactccaaagtcggcggcaactacaattacctgtaccggctgttccggaagtccaatctgaagcccttcgagcgggacatctccaccgagatctatcaggccggcagcaccccttgtaacggcgtggaaggcttcaactgctacttcccactgcagtcctacggctttcagcccacaaacggcgtgggctatcagccctacagagtggtggtgctgagcttcgaactgctgcacgcccctgccacagtgtgcggccctaagaaaagcaccaatctcgtgaagaacaagtgcgtgaacttcaacttcaacggcctgaccggcaccggcgtgctgacagagagcaacaagaagttcctgccattccagcagtttggccgggatatcgccgataccacagacgccgttagagatccccagacactggaaatcctggacatcaccccttgcagcttcggcggagtgtctgtgatcacccctggcaccaacaccagcaatcaggtggcagtgctgtaccaggacgtgaactgtaccgaagtgcccgtggccattcacgccgatcagctgacacctacctggcgggtgtactccaccggcagcaacgtgtttcagaccagagccggctgtctgatcggagccgagcacgtgaacaatagctacgagtgcgacatccccatcggcgctggaatctgcgccagctaccagacacagacaaacagccctcggagagccagaagcgtggccagccagagcatcattgcctacacaatgtctctgggcgccgagaacagcgtggcctactccaacaactctatcgctatccccaccaacttcaccatcagcgtgaccacagagatcctgcctgtgtccatgaccaagaccagcgtggactgcaccatgtacatctgcggcgattccaccgagtgctccaacctgctgctgcagtacggcagcttctgcacccagctgaatagagccctgacagggatcgccgtggaacaggacaagaacacccaagaggtgttcgcccaagtgaagcagatctacaagacccctcctatcaaggacttcggcggcttcaatttcagccagattctgcccgatcctagcaagcccagcaagcggagcttcatcgaggacctgctgttcaacaaagtgacactggccgacgccggcttcatcaagcagtacggcgattgtctgggcgacattgccgccagggatctgatttgcgcccagaagtttaacggactgacagtgctgcctcctctgctgaccgacgagatgatcgcccagtacacatctgccctgctggccggcacaatcacaagcggctggacatttggagcaggcgccgctctgcagatcccctttgctatgcagatggcctaccggttcaacggcatcggagtgacccagaacgtgctgtacgagaaccagaagctgatcgccaaccagttcaacagcgccatcggcaagatccaggacagcctgagcagcacagcaagcgccctgggaaagctgcaggacgtggtcaaccagaacgcccaggcactgaacaccctggtcaagcagctgtcctccaacttcggcgccatcagctctgtgctgaacgatatcctgagcagactggaccctcctgaggccgaggtgcagatcgacagactgatcacaggcagactgcagagcctccagacatacgtgacccagcagctgatcagagccgccgagattagagcctctgccaatctggccgccaccaagatgtctgagtgtgtgctgggccagagcaagagagtggacttttgcggcaagggctaccacctgatgagcttccctcagtctgcccctcacggcgtggtgtttctgcacgtgacatacgtgcccgctcaagagaagaatttcaccaccgctccagccatctgccacgacggcaaagcccactttcctagagaaggcgtgttcgtgtccaacggcacccattggttcgtgacacagcggaacttctacgagccccagatcatcaccaccgacaacaccttcgtgtctggcaactgcgacgtcgtgatcggcattgtgaacaataccgtgtacgaccctctgcagcccgagctggacagcttcaaagaggaactggacaagtactttaagaaccacacaagccccgacgtggacctgggcgatatcagcggaatcaacgccagcgtcgtgaacatccagaaagagatcgaccggctgaacgaggtggccaagaatctgaacgagagcctgatcgacctgcaagaactggggaagtacgagcagtacatcaagtggccctggtacatctggctgggctttatcgccggactgattgccatcgtgatggtcacaatcatgctgtgttgcatgaccagctgctgtagctgcctgaagggctgttgtagctgtggcagctgctgcaagttcgacgaggacgattctgagcccgtgctgaagggcgtgaaactgcactacaca

SEQ ID NO: 240 - DNA, 1533 bp, synthetic construct
  source 1..1533: mol_type = other DNA
atgggagtcaaagttctgtttgccctgatctgcattgctgtggccgaggccaagagagtccaaccaacagaatctattgttagatttcctaatattacaaacttgtgcccttttggtgaagtttttaacgccaccagatttgcatccgtgtatgcttggaacaggaagagaatcagcaactgtgttgctgattattctgtcctatataattccgcatcattttccacttttaagtgttatggagtgtctcctactaaattaaatgatctctgctttactaatgtctatgcagattcatttgtaattagaggtgatgaagtcagacaaatcgctccagggcaaactggaaagattgctgattataattataaattaccagatgattttacaggctgcgttatagcttggaattctaacaatcttgattctaaggttggtggtaattataattacctgtatagattgtttaggaagtctaatctcaaaccttttgagagagatatttcaactgaaatctatcaggccggtagcacaccttgtaatggtgttgaaggttttaattgttactttcctttacaatcatatggtttccaacccactaatggtgttggttaccaaccatacagagtagtagtactttcttttgaacttctacatgcaccagcaactgtttgtggacctaaaaagtctactaatttggttaaaaacaaatgtgtcaatttcggaagcggcaggctgagacgaggcagcggcgccaccaacttcagcctgttgaagcaggccggcgacgtggaggaaaaccccggccccatgggagtcaaagttctgtttgccctgatctgcattgctgtggccgaggccaagagagtccaaccaacagaatctattgttagatttcctaatattacaaacttgtgcccttttggtgaagtttttaacgccaccagatttgcatccgtgtatgcttggaacaggaagagaatcagcaactgtgttgctgattattctgtcctatataattccgcatcattttccacttttaagtgttatggagtgtctcctactaaattaaatgatctctgctttactaatgtctatgcagattcatttgtaattagaggtgatgaagtcagacaaatcgctccagggcaaactggaaagattgctgattataattataaattaccagatgattttacaggctgcgttatagcttggaattctaacaatcttgattctaaggttggtggtaattataattacctgtatagattgtttaggaagtctaatctcaaaccttttgagagagatatttcaactgaaatctatcaggccggtagcacaccttgtaatggtgttgaaggttttaattgttactttcctttacaatcatatggtttccaacccactaatggtgttggttaccaaccatacagagtagtagtactttcttttgaacttctacatgcaccagcaactgtttgtggacctaaaaagtctactaatttggttaaaaacaaatgtgtcaatttc

SEQ ID NO: 241 - DNA, 2343 bp, synthetic construct
  source 1..2343: mol_type = other DNA
atgggagtcaaagttctgtttgccctgatctgcattgctgtggccgaggccaagagagtccaaccaacagaatctattgttagatttcctaatattacaaacttgtgcccttttggtgaagtttttaacgccaccagatttgcatccgtgtatgcttggaacaggaagagaatcagcaactgtgttgctgattattctgtcctatataattccgcatcattttccacttttaagtgttatggagtgtctcctactaaattaaatgatctctgctttactaatgtctatgcagattcatttgtaattagaggtgatgaagtcagacaaatcgctccagggcaaactggaaagattgctgattataattataaattaccagatgattttacaggctgcgttatagcttggaattctaacaatcttgattctaaggttggtggtaattataattacctgtatagattgtttaggaagtctaatctcaaaccttttgagagagatatttcaactgaaatctatcaggccggtagcacaccttgtaatggtgttgaaggttttaattgttactttcctttacaatcatatggtttccaacccactaatggtgttggttaccaaccatacagagtagtagtactttcttttgaacttctacatgcaccagcaactgtttgtggacctaaaaagtctactaatttggttaaaaacaaatgtgtcaatttcggaagcggcaggctgagacgaggcagcggcgccaccaacttcagcctgttgaagcaggccggcgacgtggaggaaaaccccggccccatgggagtcaaagttctgtttgccctgatctgcattgctgtggccgaggccaagagagtccaaccaacagaatctattgttagatttcctaatattacaaacttgtgcccttttggtgaagtttttaacgccaccagatttgcatccgtgtatgcttggaacaggaagagaatcagcaactgtgttgctgattattctgtcctatataattccgcatcattttccacttttaagtgttatggagtgtctcctactaaattaaatgatctctgctttactaatgtctatgcagattcatttgtaattagaggtgatgaagtcagacaaatcgctccagggcaaactggaaagattgctgattataattataaattaccagatgattttacaggctgcgttatagcttggaattctaacaatcttgattctaaggttggtggtaattataattacctgtatagattgtttaggaagtctaatctcaaaccttttgagagagatatttcaactgaaatctatcaggccggtagcacaccttgtaatggtgttgaaggttttaattgttactttcctttacaatcatatggtttccaacccactaatggtgttggttaccaaccatacagagtagtagtactttcttttgaacttctacatgcaccagcaactgtttgtggacctaaaaagtctactaatttggttaaaaacaaatgtgtcaatttcggaagcggcaggctgagacgaggcagcggcgccaccaacttcagcctgttgaagcaggccggcgacgtggaggaaaaccccggccccatgggagtcaaagttctgtttgccctgatctgcattgctgtggccgaggccaagagagtccaaccaacagaatctattgttagatttcctaatattacaaacttgtgcccttttggtgaagtttttaacgccaccagatttgcatccgtgtatgcttggaacaggaagagaatcagcaactgtgttgctgattattctgtcctatataattccgcatcattttccacttttaagtgttatggagtgtctcctactaaattaaatgatctctgctttactaatgtctatgcagattcatttgtaattagaggtgatgaagtcagacaaatcgctccagggcaaactggaaagattgctgattataattataaattaccagatgattttacaggctgcgttatagcttggaattctaacaatcttgattctaaggttggtggtaattataattacctgtatagattgtttaggaagtctaatctcaaaccttttgagagagatatttcaactgaaatctatcaggccggtagcacaccttgtaatggtgttgaaggttttaattgttactttcctttacaatcatatggtttccaacccactaatggtgttggttaccaaccatacagagtagtagtactttcttttgaacttctacatgcaccagcaactgtttgtggacctaaaaagtctactaatttggttaaaaacaaatgtgtcaatttc

SEQ ID NO: 242 - DNA, 1479 bp, synthetic construct
  source 1..1479: mol_type = other DNA
atgggagtcaaagttctgtttgccctgatctgcattgctgtggccgaggccaagagagtccaaccaacagaatctattgttagatttcctaatattacaaacttgtgcccttttggtgaagtttttaacgccaccagatttgcatccgtgtatgcttggaacaggaagagaatcagcaactgtgttgctgattattctgtcctatataattccgcatcattttccacttttaagtgttatggagtgtctcctactaaattaaatgatctctgctttactaatgtctatgcagattcatttgtaattagaggtgatgaagtcagacaaatcgctccagggcaaactggaaagattgctgattataattataaattaccagatgattttacaggctgcgttatagcttggaattctaacaatcttgattctaaggttggtggtaattataattacctgtatagattgtttaggaagtctaatctcaaaccttttgagagagatatttcaactgaaatctatcaggccggtagcacaccttgtaatggtgttgaaggttttaattgttactttcctttacaatcatatggtttccaacccactaatggtgttggttaccaaccatacagagtagtagtactttcttttgaacttctacatgcaccagcaactgtttgtggacctaaaaagtctactaatttggttaaaaacaaatgtgtcaatttcggaagcggcaggctgagacgaggcagcggcgccaccaacttcagcctgttgaagcaggccggcgacgtggaggaaaaccccggccccagagtccaaccaacagaatctattgttagatttcctaatattacaaacttgtgcccttttggtgaagtttttaacgccaccagatttgcatccgtgtatgcttggaacaggaagagaatcagcaactgtgttgctgattattctgtcctatataattccgcatcattttccacttttaagtgttatggagtgtctcctactaaattaaatgatctctgctttactaatgtctatgcagattcatttgtaattagaggtgatgaagtcagacaaatcgctccagggcaaactggaaagattgctgattataattataaattaccagatgattttacaggctgcgttatagcttggaattctaacaatcttgattctaaggttggtggtaattataattacctgtatagattgtttaggaagtctaatctcaaaccttttgagagagatatttcaactgaaatctatcaggccggtagcacaccttgtaatggtgttgaaggttttaattgttactttcctttacaatcatatggtttccaacccactaatggtgttggttaccaaccatacagagtagtagtactttcttttgaacttctacatgcaccagcaactgtttgtggacctaaaaagtctactaatttggttaaaaacaaatgtgtcaatttc

SEQ ID NO: 243 - DNA, 2235 bp, synthetic construct
  source 1..2235: mol_type = other DNA
atgggagtcaaagttctgtttgccctgatctgcattgctgtggccgaggccaagagagtccaaccaacagaatctattgttagatttcctaatattacaaacttgtgcccttttggtgaagtttttaacgccaccagatttgcatccgtgtatgcttggaacaggaagagaatcagcaactgtgttgctgattattctgtcctatataattccgcatcattttccacttttaagtgttatggagtgtctcctactaaattaaatgatctctgctttactaatgtctatgcagattcatttgtaattagaggtgatgaagtcagacaaatcgctccagggcaaactggaaagattgctgattataattataaattaccagatgattttacaggctgcgttatagcttggaattctaacaatcttgattctaaggttggtggtaattataattacctgtatagattgtttaggaagtctaatctcaaaccttttgagagagatatttcaactgaaatctatcaggccggtagcacaccttgtaatggtgttgaaggttttaattgttactttcctttacaatcatatggtttccaacccactaatggtgttggttaccaaccatacagagtagtagtactttcttttgaacttctacatgcaccagcaactgtttgtggacctaaaaagtctactaatttggttaaaaacaaatgtgtcaatttcggaagcggcaggctgagacgaggcagcggcgccaccaacttcagcctgttgaagcaggccggcgacgtggaggaaaaccccggccccagagtccaaccaacagaatctattgttagatttcctaatattacaaacttgtgcccttttggtgaagtttttaacgccaccagatttgcatccgtgtatgcttggaacaggaagagaatcagcaactgtgttgctgattattctgtcctatataattccgcatcattttccacttttaagtgttatggagtgtctcctactaaattaaatgatctctgctttactaatgtctatgcagattcatttgtaattagaggtgatgaagtcagacaaatcgctccagggcaaactggaaagattgctgattataattataaattaccagatgattttacaggctgcgttatagcttggaattctaacaatcttgattctaaggttggtggtaattataattacctgtatagattgtttaggaagtctaatctcaaaccttttgagagagatatttcaactgaaatctatcaggccggtagcacaccttgtaatggtgttgaaggttttaattgttactttcctttacaatcatatggtttccaacccactaatggtgttggttaccaaccatacagagtagtagtactttcttttgaacttctacatgcaccagcaactgtttgtggacctaaaaagtctactaatttggttaaaaacaaatgtgtcaatttcggaagcggcaggctgagacgaggcagcggcgccaccaacttcagcctgttgaagcaggccggcgacgtggaggaaaaccccggccccagagtccaaccaacagaatctattgttagatttcctaatattacaaacttgtgcccttttggtgaagtttttaacgccaccagatttgcatccgtgtatgcttggaacaggaagagaatcagcaactgtgttgctgattattctgtcctatataattccgcatcattttccacttttaagtgttatggagtgtctcctactaaattaaatgatctctgctttactaatgtctatgcagattcatttgtaattagaggtgatgaagtcagacaaatcgctccagggcaaactggaaagattgctgattataattataaattaccagatgattttacaggctgcgttatagcttggaattctaacaatcttgattctaaggttggtggtaattataattacctgtatagattgtttaggaagtctaatctcaaaccttttgagagagatatttcaactgaaatctatcaggccggtagcacaccttgtaatggtgttgaaggttttaattgttactttcctttacaatcatatggtttccaacccactaatggtgttggttaccaaccatacagagtagtagtactttcttttgaacttctacatgcaccagcaactgtttgtggacctaaaaagtctactaatttggttaaaaacaaatgtgtcaatttc

SEQ ID NO: 244 - DNA, 981 bp, synthetic construct
  source 1..981: mol_type = other DNA
atgggagtcaaagttctgtttgccctgatctgcattgctgtggccgaggccaagagagtccaaccaacagaatctattgttagatttcctaatattacaaacttgtgcccttttggtgaagtttttaacgccaccagatttgcatccgtgtatgcttggaacaggaagagaatcagcaactgtgttgctgattattctgtcctatataattccgcatcattttccacttttaagtgttatggagtgtctcctactaaattaaatgatctctgctttactaatgtctatgcagattcatttgtaattagaggtgatgaagtcagacaaatcgctccagggcaaactggaaagattgctgattataattataaattaccagatgattttacaggctgcgttatagcttggaattctaacaatcttgattctaaggttggtggtaattataattacctgtatagattgtttaggaagtctaatctcaaaccttttgagagagatatttcaactgaaatctatcaggccggtagcacaccttgtaatggtgttgaaggttttaattgttactttcctttacaatcatatggtttccaacccactaatggtgttggttaccaaccatacagagtagtagtactttcttttgaacttctacatgcaccagcaactgtttgtggacctaaaaagtctactaatttggttaaaaacaaatgtgtcaatttcggaagcggcaggctgagacgaggcagcggcgccaccaacttcagcctgttgaagcaggccggcgacgtggaggaaaaccccggccccggcctcgaacaactcgaaagcattatcaattttgaaaaactcacagaatggaccagtggactcgagcaactcgagagtatcattaatttcgaaaagctcacagagtggacaagcggcctggagcagctggagagcatcataaacttcgagaagctgaccgagtggaccagc

SEQ ID NO: 245 - DNA, 1530 bp, synthetic construct
  source 1..1530: mol_type = other DNA
atgggagtcaaagttctgtttgccctgatctgcattgctgtggccgaggccaagagagtccaaccaacagaatctattgttagatttcctaatattacaaacttgtgcccttttggtgaagtttttaacgccaccagatttgcatccgtgtatgcttggaacaggaagagaatcagcaactgtgttgctgattattctgtcctatataattccgcatcattttccacttttaagtgttatggagtgtctcctactaaattaaatgatctctgctttactaatgtctatgcagattcatttgtaattagaggtgatgaagtcagacaaatcgctccagggcaaactggaaagattgctgattataattataaattaccagatgattttacaggctgcgttatagcttggaattctaacaatcttgattctaaggttggtggtaattataattacctgtatagattgtttaggaagtctaatctcaaaccttttgagagagatatttcaactgaaatctatcaggccggtagcacaccttgtaatggtgttgaaggttttaattgttactttcctttacaatcatatggtttccaacccactaatggtgttggttaccaaccatacagagtagtagtactttcttttgaacttctacatgcaccagcaactgtttgtggacctaaaaagtctactaatttggttaaaaacaaatgtgtcaatttccggcggaagcggagaagcggcagcggcgccaccaacttcagcctgttgaagcaggccggcgacgtggaggaaaaccccggccccatgggagtcaaagttctgtttgccctgatctgcattgctgtggccgaggccaagagagtccaaccaacagaatctattgttagatttcctaatattacaaacttgtgcccttttggtgaagtttttaacgccaccagatttgcatccgtgtatgcttggaacaggaagagaatcagcaactgtgttgctgattattctgtcctatataattccgcatcattttccacttttaagtgttatggagtgtctcctactaaattaaatgatctctgctttactaatgtctatgcagattcatttgtaattagaggtgatgaagtcagacaaatcgctccagggcaaactggaaagattgctgattataattataaattaccagatgattttacaggctgcgttatagcttggaattctaacaatcttgattctaaggttggtggtaattataattacctgtatagattgtttaggaagtctaatctcaaaccttttgagagagatatttcaactgaaatctatcaggccggtagcacaccttgtaatggtgttgaaggttttaattgttactttcctttacaatcatatggtttccaacccactaatggtgttggttaccaaccatacagagtagtagtactttcttttgaacttctacatgcaccagcaactgtttgtggacctaaaaagtctactaatttggttaaaaacaaatgtgtcaatttc

SEQ ID NO: 246 - DNA, 3844 bp, synthetic construct
  source 1..3844: mol_type = other DNA
ataggtctcacatgtttgttttcttagttttattacctttagtttcttcccagtgtgttaatttaactactagaactcaattacctcctgcttatactaattcttttactagaggagtgtattatcctgataaggtttttagatcttctgttctgcactctactcaggatttgttcttgcccttcttctctaacgtgacctggttccacgctattcacgtttctggaaccaacggcactaagagatttgataatcccgttttgccttttaacgacggagtttatttcgcctctaccgaaaaatctaacatcattaggggctggatctttggaactaccctggattctaaaactcaatctttattgattgtgaataacgctaccaacgttgtgattaaagtttgtgaatttcaattttgtaacgatccttttctgggagtttattatcataaaaacaataaatcttggatggaatctgaattccgcgtttattcttctgccaataactgtacctttgagtacgtttctcaacctttcttaatggatttagaaggaaaacaaggcaatttcaaaaacttaagagaatttgtttttaaaaatattgacggatattttaaaatttattctaagcatactcctattaatttagtgagagacttaccccaaggattttctgctttagaacctttagttgacttacctattggaatcaatatcactagatttcaaactttattagctttacatagatcttatttaactcctggagattcttcctccggctggacagccggagccgctgcttattacgttggatatttacagcctagaacttttctgctgaaatataacgaaaacggaaccattaccgacgccgttgactgtgctctggatcctttatctgaaaccaagtgtactttaaaatcttttaccgttgaaaaaggaatttatcaaacttctaattttagagttcaacctactgaatctatcgttagattccctaatattactaatttgtgtccctttggagaggttttcaacgctactagatttgcctctgtttacgcttggaatcgcaagagaatttctaattgtgtggccgattactccgttttgtataactctgcttctttctctacttttaagtgttacggagtttcccctactaaactgaacgatttgtgttttactaacgtttacgctgattcttttgttattagaggcgacgaagttagacaaattgctcctggacaaactggaaagattgctgactataactataaactgcctgacgattttaccggctgtgttattgcttggaattctaataatttagattctaaagttggaggaaattataattatttatatagattatttagaaaatctaatttaaaaccttttgaaagagatatttccactgagatttaccaggctggatctactccttgtaacggcgttgagggatttaattgttattttcctttacaatcttacggatttcaacctaccaacggagttggatatcaaccttacagagttgtggtgctgtcttttgaattattacacgctcccgctactgtttgcggccctaaaaagtctactaatctggttaagaataagtgtgtgaattttaatttcaacggattgaccggaactggagttctgactgaatctaataaaaaatttttaccctttcaacaatttggaagggatatcgctgatactactgacgctgttagagatcctcaaactttagaaatcctggatattactccttgttcttttggaggagtttccgttattactcctggcactaatacttctaatcaagttgctgttttatatcaagacgttaattgcaccgaagttcctgttgctattcacgctgatcagttaactcctacttggagagtttattctactggatctaacgtttttcaaaccagagctggctgtttaatcggagctgaacacgtgaataattcttacgagtgcgatattcccatcggagctggaatttgtgcctcttatcaaactcaaaccaattctcctaggagggctagatccgttgcctctcaatctattattgcttataccatgtctttaggagctgaaaattccgttgcttactctaacaattctattgctattcctactaactttactatttctgttactactgaaattctgcccgtgtccatgactaaaacttctgttgattgtactatgtatatttgtggagattccactgagtgttctaacctgttattacaatacggatctttttgtactcaattaaatagagctctgactggaattgctgttgaacaggacaaaaatactcaagaagtttttgcccaagttaaacagatttataaaactcctcctattaaagattttggaggatttaatttctctcaaattttacctgacccttctaagccttccaaaaggtctttcatcgaagatttattatttaataaagttaccttagccgacgctggatttattaagcaatacggagattgcttaggcgatatcgctgctagagacttaatttgtgctcaaaaatttaacggattaactgttttacctcccctgttaactgacgaaatgatcgctcaatatacttctgctctgttagctggaactattacttctggctggacttttggagctggagctgctttacaaattccctttgctatgcagatggcttatagatttaacggaattggagttactcaaaacgttttatacgaaaatcaaaaattaattgctaatcaatttaattctgctattggaaaaattcaagattccctgtcttctactgcttccgctctgggaaaattacaagacgttgttaatcaaaacgctcaagctttgaataccttagttaaacaattatcttccaattttggagctatttcttctgttttaaacgacattttatctagattagatccccctgaagctgaagttcagattgacagattgattaccggaagattacaatctttacaaacttacgttactcaacaactgattagagctgctgaaattagagcctctgctaatttagctgctactaagatgtctgagtgtgttttaggacagtccaaaagagttgatttttgtggaaaaggctatcatctgatgtcttttcctcaatctgctcctcacggagttgtgtttttacacgttacttacgttcctgctcaagagaagaattttactactgctcctgctatttgtcacgacggaaaagctcattttcctagagaaggagtttttgtttctaacggaactcattggtttgttactcaaagaaacttttacgaacctcagattattaccactgataatacctttgtttctggcaattgtgacgtggttattggaattgttaataatactgtttacgatcctttacaacccgaactggattcttttaaagaagaattagataaatactttaaaaatcatacttctcccgacgttgatttaggagatatctctggaattaacgcttctgttgtgaatattcaaaaggaaattgatagattaaacgaagtggctaaaaatttaaacgagtctttaattgatttacaggaactgggaaaatacgaacaatatattaagtggccttggtacatttggttaggctttattgctggactgattgctattgtgatggttactatcatgttgtgttgcatgacttcttgttgttcctgtttaaaaggctgttgctcttgtggatcttgttgcaaatttgacgaagacgattctgaacctgttctgaaaggagttaaactgcattatacttaaatgagaccata

SEQ ID NO: 247 - DNA, 3844 bp, synthetic construct
  source 1..3844: mol_type = other DNA
ataggtctcacatgttcgtgttcttagtgctgttacccctggtttcttctcagtgtgtcaatttaaccaccagaacccaactgcctcctgcctatactaattcctttacccgcggagtttactatcccgataaggtttttcgctcctctgttttacactctactcaggacttattcttacccttcttctccaacgttacttggtttcacgccattcacgtttctggaaccaacggaactaagagattcgataatcctgtgttacctttcaacgacggagtttattttgcttccactgaaaaatccaatatcattaggggctggatctttggaaccactttagattccaagactcaatctttattaattgtgaataacgccaccaacgtggttatcaaagtgtgtgaattccaattttgtaacgaccctttcttaggcgtgtattatcacaaaaataataaatcttggatggaatctgaatttcgcgtttactcttccgctaacaactgcacttttgagtacgtttcccagccttttctgatggatctggaaggcaaacagggaaattttaaaaatctgagagaatttgtttttaagaacattgacggatatttcaagatctattctaaacacactcccatcaatttggttagagatttacctcagggcttttctgctttagaacctttagttgacctgcctattggaatcaacattactagatttcaaactctgttagctctgcatagatcttatttaactcctggagattcctcctccggctggaccgccggagctgctgcttattacgttggctatttacaacccagaacttttctgttaaaatataacgaaaacggcaccatcactgacgccgtggattgtgctttagatcccttatccgaaactaagtgtactctgaaatccttcactgttgaaaaaggaatttatcagacctctaattttagagtgcaacctaccgaatctattgttagatttcctaatattaccaacttgtgcccttttggcgaagttttcaacgctactagatttgcttctgtttacgcttggaatagaaaaagaatttctaactgtgtggctgactattccgtgttatacaattctgcctctttttctacttttaagtgttacggagtgtctcccactaaactgaacgatttgtgctttaccaacgtttacgctgattcttttgttattagaggcgacgaggttcgccagattgcccctggccagactggcaaaattgctgactataactataaattacctgacgattttaccggctgcgttatcgcttggaactctaataatctggattctaaagttggaggaaactacaattatttatatagattatttagaaaatctaatttaaaacccttcgagagggatatctctactgaaatctaccaagctggatctactccttgcaacggcgttgaaggatttaattgttattttcctttacaatcttacggattccaacctactaacggagttggatatcagccttatagagtggtggttttatctttcgaattattacacgctcccgctactgtgtgtggacccaaaaagtctactaatttagttaaaaataagtgtgttaatttcaattttaacggactcactggcactggagtgttaactgaatctaataaaaagttcttacctttccaacagttcggacgcgacattgccgacaccactgacgctgtgagagatcctcaaaccttagagattctggatattaccccttgttcctttggaggcgtttccgttatcactcccggaactaacacttctaatcaggttgccgttttatatcaggacgttaattgcactgaagttcctgttgctattcacgctgatcaactgactcctacttggagagtttattccactggatctaacgtttttcagactcgcgccggctgtttaattggagctgaacacgtgaacaactcctacgagtgcgatattcctattggcgctggcatctgtgcttcttatcaaactcaaactaattctcccaggagggctcgctctgttgcttcccaatctatcattgcttatactatgtccttaggcgctgaaaattctgttgcttattccaacaattctattgctattcccaccaattttactatttctgtgactactgaaattttacctgtttccatgactaagacttctgttgattgtactatgtatatctgcggagattctactgagtgttccaacctcttattacagtacggatctttttgcactcagttaaatagagctctgactggaatcgctgttgaacaagacaaaaacacccaagaagtgtttgctcaggtgaagcaaatttacaagacacctcctattaaggattttggaggattcaatttttcccagattttacctgatccttctaaaccttctaaacgctcctttattgaagatttactgttcaataaagtgactctggctgacgctggcttcatcaagcaatacggcgattgtttaggagacatcgctgctagagacttaatttgtgctcaaaaattcaacggactgactgttctgccccctttactgaccgacgagatgatcgcccaatatacttctgccctgttagctggcaccattacttctggctggacctttggagctggcgctgctttacaaattcctttcgccatgcagatggcttatcgctttaacggaattggcgttacccaaaacgtgttatacgagaatcaaaaattaatcgccaatcaatttaattctgctattggcaagattcaagattctttatcttctactgcttccgccctgggcaaactgcaggacgttgttaaccagaacgctcaagccctgaacactttagtgaagcaactgtcttctaacttcggcgctatttcttccgttttaaacgacattctgtctcgcttagatccccctgaggctgaggttcaaattgatagactgattactggaagattacagtccctgcaaacttacgttactcaacagttaatcagagctgctgaaatccgcgcttccgctaatttagctgctactaaaatgtctgagtgtgtgttaggccagtctaagagagttgacttttgtggcaagggctatcatttaatgtcttttcctcagtccgctcctcacggcgttgtgttcttacacgtgacttacgttcccgcccaagagaaaaattttaccactgctcctgctatttgtcacgacggaaaagctcattttcctagagaaggagtgtttgtttctaacggaacccactggtttgtgactcaaagaaacttttacgaaccccaaattattactactgacaatactttcgtttccggcaactgtgacgtggtgatcggaattgttaataacaccgtttacgatcccttacaacctgaattagattcttttaaagaagaattagataaatatttcaaaaatcatacttcccctgacgttgatctgggagatatttctggaattaacgcttctgtggtgaacattcaaaaagagattgacagattaaacgaagttgctaaaaacctgaacgagtccctgatcgacctgcaggaactgggaaaatacgagcagtatattaagtggccttggtatatttggttaggatttattgctggattaattgctattgtgatggtgaccattatgttgtgctgtatgacctcttgttgttcttgcctgaagggctgctgttcttgtggctcttgttgcaagtttgacgaagacgattccgaacccgttttaaagggagtgaaactgcattatacttaaatgagaccata

SEQ ID NO: 248 - DNA, 3844 bp, synthetic construct
  source 1..3844: mol_type = other DNA
ataggtctcacatgtttgtttttctggttttattacccttagtgtcctcccagtgcgtgaacttaactacccgcactcagctgcctcctgcctataccaactctttcactagaggcgtttactatcctgacaaagtttttagatcttctgtgctgcattccactcaagatttattcctgcccttcttttctaacgttacttggtttcacgccatccacgtgtctggcaccaacggaaccaaacgctttgacaaccctgtgttaccttttaacgacggagtttacttcgcctccactgaaaagtccaatattatccggggctggattttcggaaccaccttagattctaaaacccagtctctgctgattgtgaacaacgccactaacgtggttattaaagtgtgcgagtttcaattttgcaacgacccttttctgggagtttattaccacaaaaataacaaatcttggatggagtctgaatttagagtgtattcttccgccaataattgcaccttcgagtacgtttcccaaccctttctgatggacttagaaggaaagcaaggcaatttcaaaaacctgcgcgaatttgtgttcaaaaatattgacggctatttcaaaatttactccaagcatacccctattaatttagtgcgcgatctgcctcagggcttctctgccttagagcctttagtggacctgcctattggcattaatattactcgctttcagactttactggccctgcatagatcttatttaactcctggagactcttcttccggctggaccgctggagccgctgcctactacgttggctatctgcagcctagaacttttttattaaagtacaacgaaaacggaaccatcactgacgctgttgattgcgccctggatcctttatctgaaacaaagtgcaccctgaagtccttcaccgttgaaaagggcatttaccaaacatccaattttagggttcagcctactgaatccatcgtgcgctttcccaacatcactaacttgtgtccctttggcgaggtgtttaacgccactcgctttgcctctgtgtacgcctggaacagaaagagaatttccaattgcgtggctgattattctgtgctgtataactccgcttctttctccacctttaagtgttacggagtgtcccctactaaactgaacgacttgtgcttcaccaacgtttacgccgattcttttgtgattcgcggcgacgaagttagacaaatcgcccccggacagaccggaaagatcgctgattacaactataagttacctgacgacttcaccggctgcgtgattgcttggaattctaataacttagactctaaagttggaggcaactacaattacctgtatagattattccgcaaatctaacctgaaaccttttgagagagacatctccaccgaaatttaccaagccggctctaccccctgcaacggagttgaaggatttaattgctactttcccctgcagtcctacggattccaacctactaacggcgttggataccaaccttacagagttgtggtgctgtcttttgaattattacacgcccctgccaccgtttgtggccctaagaaatctaccaatctggttaaaaacaagtgtgtgaattttaattttaacggcctgaccggcactggcgttttaaccgagtctaacaagaagtttctgcctttccaacaatttggcagagacatcgccgacaccaccgacgctgtgcgcgatcctcaaaccttagaaattttagatattactccttgctctttcggcggcgtttccgttattactcctggaaccaatacctctaatcaagtggctgtgctgtaccaggacgttaattgcactgaagtgcctgtggctattcacgccgatcaactgacccccacttggagagtttattctactggatctaacgtgttccaaactagagctggctgtctgatcggcgccgagcacgttaataattcttacgagtgtgatatccctattggcgctggcatttgcgcctcttaccagacccagaccaactccccccgcagagctagatccgtggcctctcagtccattattgcctatactatgtccttaggagccgaaaattctgtggcttactccaacaattctattgccattcccactaattttactatctctgtgactaccgaaatcctgcccgtgtccatgactaagacctccgtggactgcaccatgtatatctgcggagactctactgagtgttccaacttattactgcagtacggctctttctgtactcagctgaatagagccctgactggaattgctgtggagcaagacaaaaatacccaggaggtgttcgctcaggtgaaacaaatttataagacccctcccatcaaagattttggaggcttcaatttttctcaaattctgcccgacccctccaagccttccaaaagatcctttattgaagatctgctgttcaataaggttactttagccgacgccggcttcattaagcagtacggagattgtctgggcgatattgctgcccgcgacctgatttgcgctcagaagttcaacggattaaccgttctgcctcctctgctgactgacgagatgattgctcagtatacttctgccctgctggctggaactattacctctggctggaccttcggcgccggagctgctctgcaaattcccttcgccatgcaaatggcttacagatttaacggcatcggagttactcaaaacgtgctgtacgaaaaccaaaaattaattgccaaccagttcaattccgctatcggcaaaattcaggattctctgtcttctactgcttccgctttaggcaaactgcaagacgttgttaaccagaacgcccaagctttaaacaccctggttaagcagctgtcctctaattttggcgctatctcttctgttctgaacgacattttatctagactggacccccctgaagccgaggtgcagattgatagattaatcaccggaagactgcaatccctgcagacctacgttacccagcaattaatcagagccgccgagatcagagcctctgccaacttagctgccaccaaaatgtccgagtgtgtgctgggacagtccaagcgcgtggacttctgtggaaagggataccacctgatgtcttttcctcaatctgctccccacggagttgtgtttctgcacgttacttacgtgcctgcccaagagaaaaactttactaccgcccccgctatttgccacgacggcaaggctcacttccctagagaaggagtttttgtgtctaacggaacccattggtttgtgactcaaagaaatttttacgagcctcaaatcattaccaccgataacacttttgtttccggcaattgtgacgtggtgattggaatcgttaacaacaccgtttacgaccctttacagcccgaattagactcttttaaagaggagttagataaatattttaaaaaccatacctctcccgacgtggacctgggagatatttccggaattaacgcttctgttgtgaatatccagaaagagatcgacagattaaacgaggttgctaaaaatttaaacgaatccctgattgacctgcaggagctgggcaaatacgaacaatatattaagtggccttggtatatttggttaggcttcatcgctggattaatcgctattgttatggtgactattatgttgtgttgtatgacttcctgctgttcttgcttaaaaggctgctgttcctgcggatcctgttgtaaattcgacgaggacgattccgagcctgttttaaaaggagtgaaattacattatacttaaatgagaccata

SEQ ID NO: 249 - DNA, 3844 bp, synthetic construct
  source 1..3844: mol_type = other DNA
ataggtctcacatgttcgtgttcctggtgctgctgcccttagtgtcctcccagtgtgtgaacctgaccaccagaacccagttacctcccgcttacaccaactcctttacccgcggagtgtactaccctgataaggtttttagatcctccgttctgcattctacccaagacctgtttttacccttcttttccaacgtgacctggttccacgctatccacgtgtccggcactaacggcactaagcgcttcgacaatcctgtgctcccttttaacgacggcgtgtacttcgcttctaccgaaaaatccaacatcatccgcggctggatcttcggaactaccctggattctaaaacccagtctttattaatcgtgaataacgccaccaacgtggttattaaggtctgtgagttccaattttgcaacgaccctttcttaggcgtttattaccacaaaaacaataagtcttggatggagtccgaattccgcgtgtactcctctgccaacaattgcacctttgagtacgtgtcccagcccttcctgatggacctggaaggcaagcagggcaattttaaaaatctgcgcgaattcgttttcaagaacatcgacggctactttaagatttattccaaacatacccccatcaacctggtgcgcgatttaccccagggcttctccgccttagagcccttagtggatctgcctatcggcatcaatatcacccgctttcagactctgctggccctgcacagatcctacctgactcccggagactcttcttctggctggaccgccggagctgccgcctactacgtgggctacctgcaaccccgcacctttctgctgaagtacaacgaaaacggcaccatcacagacgccgttgactgcgctctggaccccctgtctgagactaagtgcaccctgaagtccttcactgtggagaaaggaatctaccagacctccaacttccgcgtgcagcctaccgaatccattgttcgcttccctaacattactaatctgtgccccttcggagaagttttcaacgccactagattcgcttccgtgtacgcctggaatcgcaagcgcatctccaattgcgttgctgactactctgtgttatacaattccgcctctttttccactttcaagtgctacggcgtgtctcctaccaagctgaacgacctgtgtttcactaacgtgtacgctgattcctttgttatccgcggcgacgaggtgagacagatcgcccctggccagaccggaaaaatcgccgactacaactacaagttacccgacgattttaccggctgtgttattgcttggaactctaataatctggactctaaagtgggcggcaattacaactacttatatcgcctgttcagaaaatccaacctgaaacccttcgaacgggacatttccaccgaaatttatcaggccggctccaccccctgcaacggagtggagggcttcaattgctacttccccctgcaatcctacggctttcagcccaccaacggcgtgggataccagccctaccgcgttgttgtgttatcctttgaactgctgcacgctcctgctactgtgtgcggacctaaaaaatccaccaatctggtgaagaacaagtgtgtgaattttaattttaacggcctgaccggcaccggagtgctgaccgagtccaacaaaaagtttctgccctttcagcagttcggccgggacattgccgacactaccgacgctgtgagggatcctcagaccctggagattctggacattaccccttgctccttcggaggagtttccgtgatcacccctggcaccaatacttctaaccaagtggctgttttataccaggacgtgaattgtactgaggtgcctgtggccatccacgccgatcaattaactcccacctggagagtgtattccaccggctctaacgttttccaaacccgcgctggctgcttaatcggcgctgagcacgtgaacaactcctacgagtgtgatattcctatcggagccggcatctgtgcttcctaccagactcagaccaactcccccagacgcgctaggtccgtggcttcccagtctattatcgcttatactatgtccctgggagccgagaattctgttgcctattccaataactccatcgccattcctaccaactttaccatctctgtgaccaccgagattctgcccgtgtccatgaccaaaacttctgtggattgtaccatgtacatctgtggagattccaccgagtgctctaacctgctgctgcagtacggctccttttgcacccaattaaaccgcgctctgactggcatcgccgtggagcaagataaaaacacccaagaggtgttcgctcaggtgaagcagatctacaagacacctcccattaaagatttcggaggctttaatttctctcagatcctgcccgacccttctaagccctctaaacgctccttcatcgaggatctgctgttcaacaaggttaccctggccgacgctggctttatcaaacagtacggcgactgcttaggcgacatcgccgcccgcgatttaatttgcgctcagaagttcaacggactgaccgtgctgcctcctctgctgaccgacgaaatgatcgcccaatacacctccgccctgctggctggcactatcacctccggctggacctttggcgctggagccgctctgcaaatccctttcgctatgcagatggcttaccgctttaacggaatcggcgtgacccagaacgtgttatacgaaaatcagaaattaattgccaatcaatttaactctgccatcggcaagattcaggattctctgtcttctactgcctctgccttaggaaaactgcaggacgtggtgaatcagaacgcccaggccctgaataccctggttaagcaactgtcttccaatttcggcgctatctcctctgtgttaaacgacattctgtcccgcctggatcctcctgaggccgaagtgcaaattgaccgcttaatcactggcagactgcaatccctgcaaacctacgttactcaacagctgatcagagccgccgaaatccgcgcttctgccaacttagctgctaccaagatgtccgagtgcgtgctgggacagtccaaaagagttgacttttgcggaaagggctaccacctgatgtcctttccccagtccgccccccacggagttgttttcctgcacgttacttacgttcctgctcaagagaagaacttcaccaccgctcccgctatttgccacgacggcaaggctcatttccccagagagggagtgtttgtgtccaacggcactcactggtttgttactcagcgcaacttctacgaacctcagatcatcaccactgacaatacctttgtgtccggaaactgtgacgtggttatcggcattgtgaacaatactgtgtacgaccctttacaacctgagctggattcttttaaagaagaactggacaagtacttcaagaaccacacctcccccgacgtggatctgggcgacatctccggcatcaacgcctctgtggtgaatattcagaaggagattgatcgcctgaacgaggttgccaagaatctgaacgagtctctgatcgacctgcaggagctgggcaagtacgaacagtacatcaagtggccctggtacatttggctgggctttattgctggactgatcgctatcgttatggttaccatcatgctgtgctgtatgacctcttgctgctcctgtctgaaaggctgttgctcctgcggctcctgttgtaagtttgacgaggacgactccgagcctgttctgaaaggagttaaactgcactacacctaaatgagaccata

SEQ ID NO: 250 - DNA, 3844 bp, synthetic construct
  source 1..3844: mol_type = other DNA
ataggtctcacatgtttgtgtttctggtgctgctgcctctggtgtcctctcagtgtgttaacctgaccaccagaacccaactgccccccgcctacactaactctttcactcgcggcgtgtactaccccgataaagttttcagatcctccgtgctccattctacccaagacctgttcttaccctttttctccaacgtgacctggttccacgccatccacgtgtccggcactaacggaaccaagcgcttcgataatcccgtgctgcctttcaacgacggagtttactttgcttccaccgagaagtccaatattatccggggctggatcttcggcaccacactggattccaaaacccagtccttactgattgtgaacaacgccactaacgtggtgatcaaggtgtgtgagttccagttctgtaacgacccctttctgggcgtgtattatcataaaaacaacaagtcctggatggagtccgagtttagagtgtattcttccgctaacaactgcaccttcgaatacgtgtcccagcctttcctgatggatctggaaggaaagcagggcaacttcaagaacttacgcgagttcgtgttcaagaacatcgacggctacttcaaaatttactccaagcacacccctatcaacttagtgagagatctgccccagggcttctccgctctggaacctctggtggacttacccattggcatcaacatcactcgcttccaaacactgctcgctctgcaccgctcttatctgacccccggcgactcctcttctggctggaccgccggcgccgctgcctattacgtgggatacctgcaaccccgcacctttctgctgaaatacaacgaaaacggcaccatcacagacgctgtggactgcgctctggaccccctgtccgagactaagtgcaccctgaagtccttcaccgttgaaaagggcatttatcagacttccaacttccgcgtgcagcctactgagtccattgtgcgcttccctaacatcactaacttgtgtcctttcggcgaagtgttcaacgctactcgcttcgcctccgtgtacgcctggaaccgcaagagaatctccaattgcgtggccgactactctgttctctacaactctgcctccttctccacctttaagtgctacggcgtgtcccccaccaaactgaacgacctgtgcttcaccaacgtgtacgccgactcctttgtgatcagaggcgacgaggtgcgccagatcgcccccggccagactggcaagatcgccgattacaattacaagctgcctgacgactttaccggctgcgtgattgcctggaactccaacaacctggactccaaagtgggcggcaactacaactacctgtaccgcctgtttagaaaatccaacctgaagcccttcgagcgggacatttctactgagatctaccaggccggctccaccccctgtaacggcgtggaaggcttcaactgctactttcccctgcagtcctacggcttccagcctaccaacggcgtgggctaccagccctaccgcgtggtggtgttatccttcgagctgctgcacgcccctgccaccgtgtgcggacccaaaaagtctactaacctggttaagaataagtgtgttaatttcaattttaacggcttaaccggaaccggagtgctgaccgagtccaataaaaagttcctgccctttcagcagtttggccgcgacatcgccgatactaccgacgccgtgcgcgatccccagaccctggagatcctggacattaccccctgctctttcggcggagtgtccgtgatcacccccggcaccaatacctccaatcaggtggccgttctgtaccaggacgtgaattgcaccgaagtgcccgtggccattcacgccgaccagttaactcctacttggagagtgtactccaccggctctaacgtgtttcagacccgcgccggctgtctgatcggcgccgagcacgtgaacaactcctacgagtgcgacattcccattggcgccggcatctgcgcctcctaccaaacccagactaactctcccagacgcgcccgctctgtggcctctcagtccatcatcgcttacactatgtccctgggcgccgagaactccgtggcctattccaacaactccatcgccatccccactaacttcaccatctctgtgaccaccgaaatcctccccgtgtctatgactaagacttccgtggactgtaccatgtacatttgcggcgactccaccgagtgttccaatctgctgctgcagtacggctccttttgcacccagctgaaccgcgccctgaccggcatcgctgttgagcaggacaagaatacccaggaggtgtttgctcaggtgaagcaaatctataagacccctcccatcaaggactttggcggcttcaacttttcccagatcctgcccgacccttccaagccctccaaacgctctttcatcgaagatctgctgttcaataaagtgaccctggccgacgccggcttcatcaagcagtacggagactgtctgggagacattgctgctcgcgacctgatttgcgcccagaagttcaacggcctgaccgtgctgccccctctgctgaccgacgagatgatcgctcagtacacctccgccctgctggctggcactatcacctccggctggactttcggcgctggcgccgccctgcagattcccttcgccatgcagatggcttatcgcttcaacggaatcggagtgacacagaacgtgctgtacgagaatcagaaactgatcgctaaccagtttaattccgccattggcaagatccaggactccctgtcctctactgcttccgccctgggcaagctgcaggacgtggtgaaccagaacgcccaggctctgaacaccctggtgaagcaactgtcttctaactttggagccatttcttccgtgctgaacgacatcctgtccagactggatcctcctgaggccgaggtgcagatcgaccgcctgatcactggccgcctgcagtccctgcagacttacgttacccagcaattaatccgcgctgccgagatccgcgcctccgccaacctggccgccaccaagatgtccgagtgcgttctgggccagtccaaacgcgttgacttctgcggcaagggctaccacctgatgtccttcccccagtccgctccccacggagtggtgttcctgcacgtgacctacgtgcctgcccaggagaagaacttcaccaccgcccccgccatttgccacgacggaaaggcccacttcccccgcgagggagtgttcgtttctaacggcactcactggttcgtgacccagagaaacttctacgagccccagattattaccaccgacaataccttcgtttctggcaactgcgacgtggttatcggcatcgtgaacaacaccgtgtacgaccccctgcaacccgagctggattctttcaaggaggagctggataagtactttaaaaaccatacctcccccgacgtggacctgggcgacatctctggcatcaacgcctccgtggtgaatatccagaaggagatcgatcgcctgaacgaggtggccaagaacttaaacgaatctctgatcgacctgcaggagctgggcaagtacgagcagtatattaagtggccctggtatatctggttaggctttatcgccggcctgatcgccattgttatggtgaccatcatgctgtgctgcatgacctcctgctgttcctgtttaaaaggctgctgctcctgcggatcctgctgtaaattcgacgaagacgactccgagcccgtgctgaaaggagttaagttacactatacctaaatgagaccata

SEQ ID NO: 251 - DNA, 3844 bp, synthetic construct
  source 1..3844: mol_type = other DNA
ataggtctcacatgttcgtgttcctggtgctgctgcccctggtgtcctcccagtgcgtcaacctgaccacccggacccaactgccccctgcctataccaattccttcacccggggcgtctactaccccgacaaggtgttccggtcctctgtgctccactccacccaggacctcttcctcccctttttctccaacgtgacctggttccacgccatccacgtgtctggcacaaacggaaccaagcgcttcgacaaccctgtgctccccttcaacgacggcgtgtacttcgcctccaccgagaagtccaacatcatccgcggctggatcttcggcaccaccctcgactctaagacccagtccctgctgattgtgaataacgccaccaacgtggtgatcaaggtgtgcgaatttcagttctgcaacgaccccttcctgggcgtttactaccataagaacaacaagtcctggatggagtccgagttccgggtgtattcctctgccaataactgcacctttgagtacgtgtcccagcccttcctgatggacctggagggcaagcagggcaattttaaaaacctgcgcgagttcgtgttcaagaacatcgacggctacttcaagatctattccaagcacacccctatcaacctggtgcgcgacctgccccagggcttttccgctctggagcccctggttgacctgcccatcggcatcaacatcacccgcttccagactttactggccctgcaccgctcctacctgacccccggcgattcctcttctggctggacagccggagccgctgcctactacgtgggatacctgcagccccgcaccttcctgctgaagtacaacgagaacggaaccattacagacgctgtcgactgtgctctggatcccctgtccgaaacaaagtgcaccctgaagtccttcaccgtggagaagggcatctaccagacctccaacttccgcgtgcagcccaccgagtccatcgtgagattccccaacatcactaacctgtgccccttcggcgaggtgttcaacgccacccgcttcgcctccgtgtacgcctggaaccgcaagcgcatctccaactgcgttgccgactactctgtgctctacaactccgcctccttctccaccttcaagtgctacggcgtgtcccccaccaagctgaacgacctgtgcttcaccaacgtgtacgccgactccttcgtgatccgcggcgacgaggtgcgccagatcgcccccggccagaccggaaagatcgccgattacaattacaagctgcccgacgacttcaccggctgcgtgatcgcctggaactccaacaatctggactccaaggttggcggcaactacaactacctgtaccgcctgttccgcaagtccaacctgaagcccttcgagcgggacatttccacagagatttaccaggctggctccaccccctgtaacggagtggagggcttcaactgctacttccccctgcagtcctacggcttccagcccaccaacggcgtgggctaccagccctaccgcgtggtggtgctgtccttcgagctgctgcacgcccctgccaccgtgtgcggccccaagaagtccaccaacctggtgaagaacaagtgcgtgaacttcaacttcaacggactgacaggcaccggcgtgctgaccgagtccaacaagaagttcctgcccttccagcagttcggccgggacattgccgacaccaccgacgccgtgcgcgacccccagaccctggagatcctggacatcaccccctgctccttcggcggagtgtccgtgatcacccccggcaccaacacctccaaccaggttgccgtgctgtaccaggacgttaactgcaccgaggtgcccgtggccatccacgccgaccagctgacccccacctggcgcgtgtactccaccggctccaacgtgttccagacccgcgccggctgcctgatcggcgccgagcacgtgaacaactcctacgagtgcgacatccccattggcgccggcatctgcgcctcctaccagacccagaccaactcccctcgccgcgcccggtccgtcgcctcccagtccatcatcgcctacaccatgtccctgggcgccgagaactccgtggcctactccaacaactccattgccatccccaccaacttcaccatctccgtgaccaccgaaatcctccccgtgtccatgaccaagacctccgtggactgcaccatgtacatctgcggcgactccaccgagtgctccaacctgctgctgcagtacggctccttctgcacccagctgaatcgcgccctgaccggcatcgccgtggagcaggacaagaacacccaagaggtgttcgcccaggtgaagcagatctacaagacacctcccatcaaggacttcggcggcttcaacttctcccagatcctgcccgacccctccaagccctccaagcgctccttcatcgaggacctgctgttcaacaaggtgaccctggccgacgccggcttcatcaagcagtacggcgactgtctgggagacattgccgcccgcgacctgatctgcgcccagaagttcaacggcttaaccgtgctgccccctctgctgaccgacgagatgatcgcccagtacacatccgctctgctggccggcaccatcacctccggctggacctttggcgctggcgctgccctgcagatccccttcgctatgcagatggcctaccgcttcaacggcatcggcgtgacccagaacgtgctgtacgagaaccagaagctgatcgccaaccagttcaactccgccatcggcaagatccaggactccctgtcctccaccgcctccgccctgggcaagctgcaggacgtggtgaaccagaacgcccaggccctgaacaccctggtgaagcagctgtcctctaacttcggcgccatctcctccgtgctgaacgacattctgtcccgcctggatcctcctgaggccgaggtgcaaatcgatcgcctcatcaccggccgcctgcagtccctgcagacctacgtgacacagcagctgatccgcgccgccgagatccgcgcctccgccaacctggccgccaccaagatgtctgagtgcgtgctgggccagtccaaacgcgttgacttctgcggcaagggctaccacctgatgtccttcccccagtccgccccccacggcgtggtgttcctgcacgtgacctacgtgcccgcccaggagaagaacttcactaccgcccccgccatctgccacgacggcaaggcccacttcccccgcgagggcgtgttcgtgtccaacggcacccactggttcgtgacccagcgcaacttctacgagccccagatcatcaccaccgacaacaccttcgtgtccggcaactgcgacgtggtgattggcatcgtgaacaacaccgtgtacgaccccctgcagcccgagctggactccttcaaggaggagctggacaagtactttaagaaccacacctcccccgacgtggacctgggcgacatctccggcatcaacgcctccgtggtgaacatccagaaggagatcgaccgcctgaacgaggtggccaagaacctgaacgagtccctgatcgacctgcaggagctgggcaagtacgaacagtacatcaagtggccctggtacatctggctgggcttcatcgccggcctgatcgccatcgtgatggtgaccatcatgctgtgctgcatgacctcttgctgttcctgtctgaagggctgctgctcctgcggctcctgctgcaagttcgacgaggacgactccgagcccgtgctgaagggcgtgaagctgcactacacctaaatgagaccata

SEQ ID NO: 252 - DNA, 3844 bp, synthetic construct
  source 1..3844: mol_type = other DNA
ataggtctcacatgttcgtgttcctggtgctgctccccctggtgagctcccagtgcgtcaacctgaccacacggacccagctgccccccgcctataccaacagcttcacccgcggcgtctactaccccgacaaggtgttccggagcagcgtgctgcacagcacccaggacctcttcctccccttttttagcaacgtgacctggttccacgccatccacgtgagtggcaccaacggcaccaagcggttcgacaaccctgtgctccccttcaacgacggcgtgtacttcgctagcacagaaaaaagtaacatcattcggggctggatcttcggcaccacactggatagcaaaacccagagcctgctgattgtgaataacgccaccaacgtggtgatcaaggtgtgcgagttccagttctgcaacgaccccttcctgggcgtgtactaccacaagaacaacaagagctggatggagagcgagttccgcgtgtatagctctgccaacaactgcaccttcgagtacgtgagccagcccttcctgatggacctggagggcaagcagggcaatttcaaaaacctgcgggagttcgtgttcaagaacatcgacggctacttcaagatctacagcaagcacacccccatcaacctggtgcgggacctgccccagggctttagcgctctggagcccctggtggacctgcccatcggcatcaacatcacccgcttccaaaccctgttggccctgcaccggagctacctgacccctggcgatagcagtagtggctggacagccggagccgccgcctactacgtgggatacctgcagccccggaccttcctgctgaagtacaacgagaacggcacaatcacagacgccgtggactgcgccctggaccccctgagcgaaacaaagtgcaccctcaaaagtttcaccgtggagaagggcatctaccagaccagcaacttccgggtgcagcccaccgagagcatcgtgcggttccccaacatcaccaacctgtgccccttcggcgaggtgttcaacgccacccggttcgccagcgtgtacgcctggaaccggaagcggatcagcaactgcgtggccgactacagcgtgctgtataacagtgccagcttcagcaccttcaagtgctacggcgtgagccccaccaagctgaacgacctgtgcttcaccaacgtgtacgccgacagcttcgtgatccggggcgacgaggtgcggcagatcgcccccggccagaccggcaagatcgccgattacaattacaagctgcccgacgatttcaccggctgcgtgatcgcctggaacagcaacaacctggacagcaaggtgggcggcaactacaactacctgtaccggctgttccgcaaaagtaacctgaagcccttcgagcgggacatcagcaccgagatctaccaggccggcagtaccccttgcaacggcgtcgagggcttcaactgctacttccccctgcagagctacggcttccagcccaccaacggcgtgggctaccagccctaccgggtggtggttctgagcttcgagctgctgcacgcccctgccaccgtgtgcggccccaagaaaagcaccaacctggtgaagaacaagtgcgtgaatttcaattttaacggactcaccggaaccggcgtgctgaccgagagcaacaagaagttcctgcccttccagcaattcggccgggatattgccgacaccactgacgccgtgcgggacccccagaccctggagatcctggacatcacaccctgtagcttcggcggggtgagcgtgatcacccccggcaccaacaccagcaaccaggtggccgtgctgtaccaggacgtgaactgcaccgaggtgcccgtggccatccacgccgaccagctgacccccacctggcgggtgtacagcaccggcagcaacgtgttccagacccgggccggctgcctgatcggcgccgagcacgtgaataacagctacgagtgcgacatccccatcggagccggaatctgcgccagctaccagacccagaccaacagcccccggagagcccggagcgtggccagccagagcattattgcctacaccatgagcctgggcgccgagaacagcgtggcctacagcaacaatagtattgccatccccaccaacttcaccatcagcgtgaccaccgaaatcctccccgtgagcatgaccaagaccagcgtggactgcaccatgtacatctgcggcgacagcaccgagtgcagcaacctgctcctgcagtacggcagcttctgcacccagctgaaccgggccctgaccggaattgccgtggagcaggacaagaacacccaggaggtgttcgcccaggtgaagcagatctacaagacacctcccatcaaggacttcggcggcttcaacttcagccagatcctgcccgaccccagcaagcccagcaagcggagcttcatcgaggacctgttgttcaacaaggtgaccctggccgacgccggcttcatcaagcagtacggcgactgtctgggagatattgccgcacgggacctgatctgcgcccagaagttcaacggcctgaccgtgctgcccccactgctgaccgacgagatgatcgcccagtacacaagcgctctgctcgccggcaccatcaccagcggctggaccttcggcgccggcgctgccctgcagatccccttcgccatgcagatggcctaccggttcaacggcatcggcgtgacccagaacgtgctgtacgagaaccagaagctgatcgccaaccagttcaacagcgccatcggcaagatccaggacagcctgagctccaccgccagcgccctgggcaagctgcaggacgtggtgaaccagaacgcccaggccctgaacaccctggtgaagcagctgagcagcaacttcggcgccatcagctctgtgctgaacgacatcctgagccggctggatcctcctgaggccgaggtgcaaatcgatcggctcatcaccggccggctgcagagcctgcagacctacgtgacacagcagctgatccgggccgccgagatccgggccagcgccaacctggccgctaccaagatgagcgagtgcgtgctgggccagagcaagcgggtggacttctgcggcaagggctaccacctgatgagcttcccccagagcgccccccacggcgtggtgttcctgcacgtgacctacgtgcccgcccaggagaagaacttcaccaccgcccccgccatctgccacgacggcaaggcccacttcccccgggagggcgtgttcgtgagcaacggcacccactggttcgtgacccagcggaacttctacgagccccagatcataaccacagacaacaccttcgtgagcggcaactgcgacgtggtcatcggcatcgtgaacaacaccgtgtacgaccccctgcagcccgagctggacagcttcaaggaggaactggacaagtacttcaagaaccacaccagccccgacgtggacctgggcgacatcagcggcatcaacgccagcgtggtgaacatccagaaggagatcgaccggctgaacgaggtggccaagaacctgaacgagagcctgatcgacctgcaggagctgggcaagtacgagcagtacatcaagtggccctggtacatctggctgggctttattgccggcctgatcgccatcgtgatggtgaccatcatgctgtgctgtatgacaagctgttgcagttgcctgaagggctgctgcagctgcggcagctgctgcaagttcgacgaggacgacagcgagcccgtgctgaagggcgtgaagctgcactacacctaaatgagaccata

SEQ ID NO: 253 - DNA, 4588 bp, synthetic construct
  source 1..4588: mol_type = other DNA
ataggtctcacacattaaaacagcctgtgggttgatcccacccacaggcccattgggcgctagcactctggtatcacggtacctttgtgcgcctgttttataccccctcccccaactgtaacttagaagtaacacacaccgatcaacagtcagcgtggcacaccagccacgttttgatcaagcacttctgttaccccggactgagtatcaatagactgctcacgcggttgaaggagaaagcgttcgttatccggccaactacttcgaaaaacctagtaacaccgtggaagttgcagagtgtttcgctcagcactaccccagtgtagatcaggtcgatgagtcaccgcattccccacgggcgaccgtggcggtggctgcgttggcggcctgcccatggggaaacccatgggacgctctaatacagacatggtgcgaagagtctattgagctagttggtagtcctccggcccctgaatgcggctaatcctaactgcggagcacacaccctcaagccagagggcagtgtgtcgtaacgggcaactctgcagcggaaccgactactttgggtgtccgtgtttcattttattcctatactggctgcttatggtgacaattgagagatcgttaccatatagctattggattggccatccggtgactaatagagctattatatatccctttgttgggtttataccacttagcttgaaagaggttaaaacattacaattcattgttaagttgaatacagcaacatgtttgttttcttagttttattacctttagtttcttcccagtgtgttaatttaactactagaactcaattacctcctgcttatactaattcttttactagaggagtgtattatcctgataaggtttttagatcttctgttctgcactctactcaggatttgttcttgcccttcttctctaacgtgacctggttccacgctattcacgtttctggaaccaacggcactaagagatttgataatcccgttttgccttttaacgacggagtttatttcgcctctaccgaaaaatctaacatcattaggggctggatctttggaactaccctggattctaaaactcaatctttattgattgtgaataacgctaccaacgttgtgattaaagtttgtgaatttcaattttgtaacgatccttttctgggagtttattatcataaaaacaataaatcttggatggaatctgaattccgcgtttattcttctgccaataactgtacctttgagtacgtttctcaacctttcttaatggatttagaaggaaaacaaggcaatttcaaaaacttaagagaatttgtttttaaaaatattgacggatattttaaaatttattctaagcatactcctattaatttagtgagagacttaccccaaggattttctgctttagaacctttagttgacttacctattggaatcaatatcactagatttcaaactttattagctttacatagatcttatttaactcctggagattcttcctccggctggacagccggagccgctgcttattacgttggatatttacagcctagaacttttctgctgaaatataacgaaaacggaaccattaccgacgccgttgactgtgctctggatcctttatctgaaaccaagtgtactttaaaatcttttaccgttgaaaaaggaatttatcaaacttctaattttagagttcaacctactgaatctatcgttagattccctaatattactaatttgtgtccctttggagaggttttcaacgctactagatttgcctctgtttacgcttggaatcgcaagagaatttctaattgtgtggccgattactccgttttgtataactctgcttctttctctacttttaagtgttacggagtttcccctactaaactgaacgatttgtgttttactaacgtttacgctgattcttttgttattagaggcgacgaagttagacaaattgctcctggacaaactggaaagattgctgactataactataaactgcctgacgattttaccggctgtgttattgcttggaattctaataatttagattctaaagttggaggaaattataattatttatatagattatttagaaaatctaatttaaaaccttttgaaagagatatttccactgagatttaccaggctggatctactccttgtaacggcgttgagggatttaattgttattttcctttacaatcttacggatttcaacctaccaacggagttggatatcaaccttacagagttgtggtgctgtcttttgaattattacacgctcccgctactgtttgcggccctaaaaagtctactaatctggttaagaataagtgtgtgaattttaatttcaacggattgaccggaactggagttctgactgaatctaataaaaaatttttaccctttcaacaatttggaagggatatcgctgatactactgacgctgttagagatcctcaaactttagaaatcctggatattactccttgttcttttggaggagtttccgttattactcctggcactaatacttctaatcaagttgctgttttatatcaagacgttaattgcaccgaagttcctgttgctattcacgctgatcagttaactcctacttggagagtttattctactggatctaacgtttttcaaaccagagctggctgtttaatcggagctgaacacgtgaataattcttacgagtgcgatattcccatcggagctggaatttgtgcctcttatcaaactcaaaccaattctcctaggagggctagatccgttgcctctcaatctattattgcttataccatgtctttaggagctgaaaattccgttgcttactctaacaattctattgctattcctactaactttactatttctgttactactgaaattctgcccgtgtccatgactaaaacttctgttgattgtactatgtatatttgtggagattccactgagtgttctaacctgttattacaatacggatctttttgtactcaattaaatagagctctgactggaattgctgttgaacaggacaaaaatactcaagaagtttttgcccaagttaaacagatttataaaactcctcctattaaagattttggaggatttaatttctctcaaattttacctgacccttctaagccttccaaaaggtctttcatcgaagatttattatttaataaagttaccttagccgacgctggatttattaagcaatacggagattgcttaggcgatatcgctgctagagacttaatttgtgctcaaaaatttaacggattaactgttttacctcccctgttaactgacgaaatgatcgctcaatatacttctgctctgttagctggaactattacttctggctggacttttggagctggagctgctttacaaattccctttgctatgcagatggcttatagatttaacggaattggagttactcaaaacgttttatacgaaaatcaaaaattaattgctaatcaatttaattctgctattggaaaaattcaagattccctgtcttctactgcttccgctctgggaaaattacaagacgttgttaatcaaaacgctcaagctttgaataccttagttaaacaattatcttccaattttggagctatttcttctgttttaaacgacattttatctagattagatccccctgaagctgaagttcagattgacagattgattaccggaagattacaatctttacaaacttacgttactcaacaactgattagagctgctgaaattagagcctctgctaatttagctgctactaagatgtctgagtgtgttttaggacagtccaaaagagttgatttttgtggaaaaggctatcatctgatgtcttttcctcaatctgctcctcacggagttgtgtttttacacgttacttacgttcctgctcaagagaagaattttactactgctcctgctatttgtcacgacggaaaagctcattttcctagagaaggagtttttgtttctaacggaactcattggtttgttactcaaagaaacttttacgaacctcagattattaccactgataatacctttgtttctggcaattgtgacgtggttattggaattgttaataatactgtttacgatcctttacaacccgaactggattcttttaaagaagaattagataaatactttaaaaatcatacttctcccgacgttgatttaggagatatctctggaattaacgcttctgttgtgaatattcaaaaggaaattgatagattaaacgaagtggctaaaaatttaaacgagtctttaattgatttacaggaactgggaaaatacgaacaatatattaagtggccttggtacatttggttaggctttattgctggactgattgctattgtgatggttactatcatgttgtgttgcatgacttcttgttgttcctgtttaaaaggctgttgctcttgtggatcttgttgcaaatttgacgaagacgattctgaacctgttctgaaaggagttaaactgcattatacttaaatgagaccata

SEQ ID NO: 254 - DNA, 4588 bp, synthetic construct
  source 1..4588: mol_type = other DNA
ataggtctcacacattaaaacagcctgtgggttgatcccacccacaggcccattgggcgctagcactctggtatcacggtacctttgtgcgcctgttttataccccctcccccaactgtaacttagaagtaacacacaccgatcaacagtcagcgtggcacaccagccacgttttgatcaagcacttctgttaccccggactgagtatcaatagactgctcacgcggttgaaggagaaagcgttcgttatccggccaactacttcgaaaaacctagtaacaccgtggaagttgcagagtgtttcgctcagcactaccccagtgtagatcaggtcgatgagtcaccgcattccccacgggcgaccgtggcggtggctgcgttggcggcctgcccatggggaaacccatgggacgctctaatacagacatggtgcgaagagtctattgagctagttggtagtcctccggcccctgaatgcggctaatcctaactgcggagcacacaccctcaagccagagggcagtgtgtcgtaacgggcaactctgcagcggaaccgactactttgggtgtccgtgtttcattttattcctatactggctgcttatggtgacaattgagagatcgttaccatatagctattggattggccatccggtgactaatagagctattatatatccctttgttgggtttataccacttagcttgaaagaggttaaaacattacaattcattgttaagttgaatacagcaacatgttcgtgttcttagtgctgttacccctggtttcttctcagtgtgtcaatttaaccaccagaacccaactgcctcctgcctatactaattcctttacccgcggagtttactatcccgataaggtttttcgctcctctgttttacactctactcaggacttattcttacccttcttctccaacgttacttggtttcacgccattcacgtttctggaaccaacggaactaagagattcgataatcctgtgttacctttcaacgacggagtttattttgcttccactgaaaaatccaatatcattaggggctggatctttggaaccactttagattccaagactcaatctttattaattgtgaataacgccaccaacgtggttatcaaagtgtgtgaattccaattttgtaacgaccctttcttaggcgtgtattatcacaaaaataataaatcttggatggaatctgaatttcgcgtttactcttccgctaacaactgcacttttgagtacgtttcccagccttttctgatggatctggaaggcaaacagggaaattttaaaaatctgagagaatttgtttttaagaacattgacggatatttcaagatctattctaaacacactcccatcaatttggttagagatttacctcagggcttttctgctttagaacctttagttgacctgcctattggaatcaacattactagatttcaaactctgttagctctgcatagatcttatttaactcctggagattcctcctccggctggaccgccggagctgctgcttattacgttggctatttacaacccagaacttttctgttaaaatataacgaaaacggcaccatcactgacgccgtggattgtgctttagatcccttatccgaaactaagtgtactctgaaatccttcactgttgaaaaaggaatttatcagacctctaattttagagtgcaacctaccgaatctattgttagatttcctaatattaccaacttgtgcccttttggcgaagttttcaacgctactagatttgcttctgtttacgcttggaatagaaaaagaatttctaactgtgtggctgactattccgtgttatacaattctgcctctttttctacttttaagtgttacggagtgtctcccactaaactgaacgatttgtgctttaccaacgtttacgctgattcttttgttattagaggcgacgaggttcgccagattgcccctggccagactggcaaaattgctgactataactataaattacctgacgattttaccggctgcgttatcgcttggaactctaataatctggattctaaagttggaggaaactacaattatttatatagattatttagaaaatctaatttaaaacccttcgagagggatatctctactgaaatctaccaagctggatctactccttgcaacggcgttgaaggatttaattgttattttcctttacaatcttacggattccaacctactaacggagttggatatcagccttatagagtggtggttttatctttcgaattattacacgctcccgctactgtgtgtggacccaaaaagtctactaatttagttaaaaataagtgtgttaatttcaattttaacggactcactggcactggagtgttaactgaatctaataaaaagttcttacctttccaacagttcggacgcgacattgccgacaccactgacgctgtgagagatcctcaaaccttagagattctggatattaccccttgttcctttggaggcgtttccgttatcactcccggaactaacacttctaatcaggttgccgttttatatcaggacgttaattgcactgaagttcctgttgctattcacgctgatcaactgactcctacttggagagtttattccactggatctaacgtttttcagactcgcgccggctgtttaattggagctgaacacgtgaacaactcctacgagtgcgatattcctattggcgctggcatctgtgcttcttatcaaactcaaactaattctcccaggagggctcgctctgttgcttcccaatctatcattgcttatactatgtccttaggcgctgaaaattctgttgcttattccaacaattctattgctattcccaccaattttactatttctgtgactactgaaattttacctgtttccatgactaagacttctgttgattgtactatgtatatctgcggagattctactgagtgttccaacctcttattacagtacggatctttttgcactcagttaaatagagctctgactggaatcgctgttgaacaagacaaaaacacccaagaagtgtttgctcaggtgaagcaaatttacaagacacctcctattaaggattttggaggattcaatttttcccagattttacctgatccttctaaaccttctaaacgctcctttattgaagatttactgttcaataaagtgactctggctgacgctggcttcatcaagcaatacggcgattgtttaggagacatcgctgctagagacttaatttgtgctcaaaaattcaacggactgactgttctgccccctttactgaccgacgagatgatcgcccaatatacttctgccctgttagctggcaccattacttctggctggacctttggagctggcgctgctttacaaattcctttcgccatgcagatggcttatcgctttaacggaattggcgttacccaaaacgtgttatacgagaatcaaaaattaatcgccaatcaatttaattctgctattggcaagattcaagattctttatcttctactgcttccgccctgggcaaactgcaggacgttgttaaccagaacgctcaagccctgaacactttagtgaagcaactgtcttctaacttcggcgctatttcttccgttttaaacgacattctgtctcgcttagatccccctgaggctgaggttcaaattgatagactgattactggaagattacagtccctgcaaacttacgttactcaacagttaatcagagctgctgaaatccgcgcttccgctaatttagctgctactaaaatgtctgagtgtgtgttaggccagtctaagagagttgacttttgtggcaagggctatcatttaatgtcttttcctcagtccgctcctcacggcgttgtgttcttacacgtgacttacgttcccgcccaagagaaaaattttaccactgctcctgctatttgtcacgacggaaaagctcattttcctagagaaggagtgtttgtttctaacggaacccactggtttgtgactcaaagaaacttttacgaaccccaaattattactactgacaatactttcgtttccggcaactgtgacgtggtgatcggaattgttaataacaccgtttacgatcccttacaacctgaattagattcttttaaagaagaattagataaatatttcaaaaatcatacttcccctgacgttgatctgggagatatttctggaattaacgcttctgtggtgaacattcaaaaagagattgacagattaaacgaagttgctaaaaacctgaacgagtccctgatcgacctgcaggaactgggaaaatacgagcagtatattaagtggccttggtatatttggttaggatttattgctggattaattgctattgtgatggtgaccattatgttgtgctgtatgacctcttgttgttcttgcctgaagggctgctgttcttgtggctcttgttgcaagtttgacgaagacgattccgaacccgttttaaagggagtgaaactgcattatacttaaatgagaccata

SEQ ID NO: 255 - DNA, 4588 bp, synthetic construct
  source 1..4588: mol_type = other DNA
ataggtctcacacattaaaacagcctgtgggttgatcccacccacaggcccattgggcgctagcactctggtatcacggtacctttgtgcgcctgttttataccccctcccccaactgtaacttagaagtaacacacaccgatcaacagtcagcgtggcacaccagccacgttttgatcaagcacttctgttaccccggactgagtatcaatagactgctcacgcggttgaaggagaaagcgttcgttatccggccaactacttcgaaaaacctagtaacaccgtggaagttgcagagtgtttcgctcagcactaccccagtgtagatcaggtcgatgagtcaccgcattccccacgggcgaccgtggcggtggctgcgttggcggcctgcccatggggaaacccatgggacgctctaatacagacatggtgcgaagagtctattgagctagttggtagtcctccggcccctgaatgcggctaatcctaactgcggagcacacaccctcaagccagagggcagtgtgtcgtaacgggcaactctgcagcggaaccgactactttgggtgtccgtgtttcattttattcctatactggctgcttatggtgacaattgagagatcgttaccatatagctattggattggccatccggtgactaatagagctattatatatccctttgttgggtttataccacttagcttgaaagaggttaaaacattacaattcattgttaagttgaatacagcaacatgtttgtttttctggttttattacccttagtgtcctcccagtgcgtgaacttaactacccgcactcagctgcctcctgcctataccaactctttcactagaggcgtttactatcctgacaaagtttttagatcttctgtgctgcattccactcaagatttattcctgcccttcttttctaacgttacttggtttcacgccatccacgtgtctggcaccaacggaaccaaacgctttgacaaccctgtgttaccttttaacgacggagtttacttcgcctccactgaaaagtccaatattatccggggctggattttcggaaccaccttagattctaaaacccagtctctgctgattgtgaacaacgccactaacgtggttattaaagtgtgcgagtttcaattttgcaacgacccttttctgggagtttattaccacaaaaataacaaatcttggatggagtctgaatttagagtgtattcttccgccaataattgcaccttcgagtacgtttcccaaccctttctgatggacttagaaggaaagcaaggcaatttcaaaaacctgcgcgaatttgtgttcaaaaatattgacggctatttcaaaatttactccaagcatacccctattaatttagtgcgcgatctgcctcagggcttctctgccttagagcctttagtggacctgcctattggcattaatattactcgctttcagactttactggccctgcatagatcttatttaactcctggagactcttcttccggctggaccgctggagccgctgcctactacgttggctatctgcagcctagaacttttttattaaagtacaacgaaaacggaaccatcactgacgctgttgattgcgccctggatcctttatctgaaacaaagtgcaccctgaagtccttcaccgttgaaaagggcatttaccaaacatccaattttagggttcagcctactgaatccatcgtgcgctttcccaacatcactaacttgtgtccctttggcgaggtgtttaacgccactcgctttgcctctgtgtacgcctggaacagaaagagaatttccaattgcgtggctgattattctgtgctgtataactccgcttctttctccacctttaagtgttacggagtgtcccctactaaactgaacgacttgtgcttcaccaacgtttacgccgattcttttgtgattcgcggcgacgaagttagacaaatcgcccccggacagaccggaaagatcgctgattacaactataagttacctgacgacttcaccggctgcgtgattgcttggaattctaataacttagactctaaagttggaggcaactacaattacctgtatagattattccgcaaatctaacctgaaaccttttgagagagacatctccaccgaaatttaccaagccggctctaccccctgcaacggagttgaaggatttaattgctactttcccctgcagtcctacggattccaacctactaacggcgttggataccaaccttacagagttgtggtgctgtcttttgaattattacacgcccctgccaccgtttgtggccctaagaaatctaccaatctggttaaaaacaagtgtgtgaattttaattttaacggcctgaccggcactggcgttttaaccgagtctaacaagaagtttctgcctttccaacaatttggcagagacatcgccgacaccaccgacgctgtgcgcgatcctcaaaccttagaaattttagatattactccttgctctttcggcggcgtttccgttattactcctggaaccaatacctctaatcaagtggctgtgctgtaccaggacgttaattgcactgaagtgcctgtggctattcacgccgatcaactgacccccacttggagagtttattctactggatctaacgtgttccaaactagagctggctgtctgatcggcgccgagcacgttaataattcttacgagtgtgatatccctattggcgctggcatttgcgcctcttaccagacccagaccaactccccccgcagagctagatccgtggcctctcagtccattattgcctatactatgtccttaggagccgaaaattctgtggcttactccaacaattctattgccattcccactaattttactatctctgtgactaccgaaatcctgcccgtgtccatgactaagacctccgtggactgcaccatgtatatctgcggagactctactgagtgttccaacttattactgcagtacggctctttctgtactcagctgaatagagccctgactggaattgctgtggagcaagacaaaaatacccaggaggtgttcgctcaggtgaaacaaatttataagacccctcccatcaaagattttggaggcttcaatttttctcaaattctgcccgacccctccaagccttccaaaagatcctttattgaagatctgctgttcaataaggttactttagccgacgccggcttcattaagcagtacggagattgtctgggcgatattgctgcccgcgacctgatttgcgctcagaagttcaacggattaaccgttctgcctcctctgctgactgacgagatgattgctcagtatacttctgccctgctggctggaactattacctctggctggaccttcggcgccggagctgctctgcaaattcccttcgccatgcaaatggcttacagatttaacggcatcggagttactcaaaacgtgctgtacgaaaaccaaaaattaattgccaaccagttcaattccgctatcggcaaaattcaggattctctgtcttctactgcttccgctttaggcaaactgcaagacgttgttaaccagaacgcccaagctttaaacaccctggttaagcagctgtcctctaattttggcgctatctcttctgttctgaacgacattttatctagactggacccccctgaagccgaggtgcagattgatagattaatcaccggaagactgcaatccctgcagacctacgttacccagcaattaatcagagccgccgagatcagagcctctgccaacttagctgccaccaaaatgtccgagtgtgtgctgggacagtccaagcgcgtggacttctgtggaaagggataccacctgatgtcttttcctcaatctgctccccacggagttgtgtttctgcacgttacttacgtgcctgcccaagagaaaaactttactaccgcccccgctatttgccacgacggcaaggctcacttccctagagaaggagtttttgtgtctaacggaacccattggtttgtgactcaaagaaatttttacgagcctcaaatcattaccaccgataacacttttgtttccggcaattgtgacgtggtgattggaatcgttaacaacaccgtttacgaccctttacagcccgaattagactcttttaaagaggagttagataaatattttaaaaaccatacctctcccgacgtggacctgggagatatttccggaattaacgcttctgttgtgaatatccagaaagagatcgacagattaaacgaggttgctaaaaatttaaacgaatccctgattgacctgcaggagctgggcaaatacgaacaatatattaagtggccttggtatatttggttaggcttcatcgctggattaatcgctattgttatggtgactattatgttgtgttgtatgacttcctgctgttcttgcttaaaaggctgctgttcctgcggatcctgttgtaaattcgacgaggacgattccgagcctgttttaaaaggagtgaaattacattatacttaaatgagaccata

SEQ ID NO: 256 - DNA, 4588 bp, synthetic construct
  source 1..4588: mol_type = other DNA
ataggtctcacacattaaaacagcctgtgggttgatcccacccacaggcccattgggcgctagcactctggtatcacggtacctttgtgcgcctgttttataccccctcccccaactgtaacttagaagtaacacacaccgatcaacagtcagcgtggcacaccagccacgttttgatcaagcacttctgttaccccggactgagtatcaatagactgctcacgcggttgaaggagaaagcgttcgttatccggccaactacttcgaaaaacctagtaacaccgtggaagttgcagagtgtttcgctcagcactaccccagtgtagatcaggtcgatgagtcaccgcattccccacgggcgaccgtggcggtggctgcgttggcggcctgcccatggggaaacccatgggacgctctaatacagacatggtgcgaagagtctattgagctagttggtagtcctccggcccctgaatgcggctaatcctaactgcggagcacacaccctcaagccagagggcagtgtgtcgtaacgggcaactctgcagcggaaccgactactttgggtgtccgtgtttcattttattcctatactggctgcttatggtgacaattgagagatcgttaccatatagctattggattggccatccggtgactaatagagctattatatatccctttgttgggtttataccacttagcttgaaagaggttaaaacattacaattcattgttaagttgaatacagcaacatgttcgtgttcctggtgctgctgcccttagtgtcctcccagtgtgtgaacctgaccaccagaacccagttacctcccgcttacaccaactcctttacccgcggagtgtactaccctgataaggtttttagatcctccgttctgcattctacccaagacctgtttttacccttcttttccaacgtgacctggttccacgctatccacgtgtccggcactaacggcactaagcgcttcgacaatcctgtgctcccttttaacgacggcgtgtacttcgcttctaccgaaaaatccaacatcatccgcggctggatcttcggaactaccctggattctaaaacccagtctttattaatcgtgaataacgccaccaacgtggttattaaggtctgtgagttccaattttgcaacgaccctttcttaggcgtttattaccacaaaaacaataagtcttggatggagtccgaattccgcgtgtactcctctgccaacaattgcacctttgagtacgtgtcccagcccttcctgatggacctggaaggcaagcagggcaattttaaaaatctgcgcgaattcgttttcaagaacatcgacggctactttaagatttattccaaacatacccccatcaacctggtgcgcgatttaccccagggcttctccgccttagagcccttagtggatctgcctatcggcatcaatatcacccgctttcagactctgctggccctgcacagatcctacctgactcccggagactcttcttctggctggaccgccggagctgccgcctactacgtgggctacctgcaaccccgcacctttctgctgaagtacaacgaaaacggcaccatcacagacgccgttgactgcgctctggaccccctgtctgagactaagtgcaccctgaagtccttcactgtggagaaaggaatctaccagacctccaacttccgcgtgcagcctaccgaatccattgttcgcttccctaacattactaatctgtgccccttcggagaagttttcaacgccactagattcgcttccgtgtacgcctggaatcgcaagcgcatctccaattgcgttgctgactactctgtgttatacaattccgcctctttttccactttcaagtgctacggcgtgtctcctaccaagctgaacgacctgtgtttcactaacgtgtacgctgattcctttgttatccgcggcgacgaggtgagacagatcgcccctggccagaccggaaaaatcgccgactacaactacaagttacccgacgattttaccggctgtgttattgcttggaactctaataatctggactctaaagtgggcggcaattacaactacttatatcgcctgttcagaaaatccaacctgaaacccttcgaacgggacatttccaccgaaatttatcaggccggctccaccccctgcaacggagtggagggcttcaattgctacttccccctgcaatcctacggctttcagcccaccaacggcgtgggataccagccctaccgcgttgttgtgttatcctttgaactgctgcacgctcctgctactgtgtgcggacctaaaaaatccaccaatctggtgaagaacaagtgtgtgaattttaattttaacggcctgaccggcaccggagtgctgaccgagtccaacaaaaagtttctgccctttcagcagttcggccgggacattgccgacactaccgacgctgtgagggatcctcagaccctggagattctggacattaccccttgctccttcggaggagtttccgtgatcacccctggcaccaatacttctaaccaagtggctgttttataccaggacgtgaattgtactgaggtgcctgtggccatccacgccgatcaattaactcccacctggagagtgtattccaccggctctaacgttttccaaacccgcgctggctgcttaatcggcgctgagcacgtgaacaactcctacgagtgtgatattcctatcggagccggcatctgtgcttcctaccagactcagaccaactcccccagacgcgctaggtccgtggcttcccagtctattatcgcttatactatgtccctgggagccgagaattctgttgcctattccaataactccatcgccattcctaccaactttaccatctctgtgaccaccgagattctgcccgtgtccatgaccaaaacttctgtggattgtaccatgtacatctgtggagattccaccgagtgctctaacctgctgctgcagtacggctccttttgcacccaattaaaccgcgctctgactggcatcgccgtggagcaagataaaaacacccaagaggtgttcgctcaggtgaagcagatctacaagacacctcccattaaagatttcggaggctttaatttctctcagatcctgcccgacccttctaagccctctaaacgctccttcatcgaggatctgctgttcaacaaggttaccctggccgacgctggctttatcaaacagtacggcgactgcttaggcgacatcgccgcccgcgatttaatttgcgctcagaagttcaacggactgaccgtgctgcctcctctgctgaccgacgaaatgatcgcccaatacacctccgccctgctggctggcactatcacctccggctggacctttggcgctggagccgctctgcaaatccctttcgctatgcagatggcttaccgctttaacggaatcggcgtgacccagaacgtgttatacgaaaatcagaaattaattgccaatcaatttaactctgccatcggcaagattcaggattctctgtcttctactgcctctgccttaggaaaactgcaggacgtggtgaatcagaacgcccaggccctgaataccctggttaagcaactgtcttccaatttcggcgctatctcctctgtgttaaacgacattctgtcccgcctggatcctcctgaggccgaagtgcaaattgaccgcttaatcactggcagactgcaatccctgcaaacctacgttactcaacagctgatcagagccgccgaaatccgcgcttctgccaacttagctgctaccaagatgtccgagtgcgtgctgggacagtccaaaagagttgacttttgcggaaagggctaccacctgatgtcctttccccagtccgccccccacggagttgttttcctgcacgttacttacgttcctgctcaagagaagaacttcaccaccgctcccgctatttgccacgacggcaaggctcatttccccagagagggagtgtttgtgtccaacggcactcactggtttgttactcagcgcaacttctacgaacctcagatcatcaccactgacaatacctttgtgtccggaaactgtgacgtggttatcggcattgtgaacaatactgtgtacgaccctttacaacctgagctggattcttttaaagaagaactggacaagtacttcaagaaccacacctcccccgacgtggatctgggcgacatctccggcatcaacgcctctgtggtgaatattcagaaggagattgatcgcctgaacgaggttgccaagaatctgaacgagtctctgatcgacctgcaggagctgggcaagtacgaacagtacatcaagtggccctggtacatttggctgggctttattgctggactgatcgctatcgttatggttaccatcatgctgtgctgtatgacctcttgctgctcctgtctgaaaggctgttgctcctgcggctcctgttgtaagtttgacgaggacgactccgagcctgttctgaaaggagttaaactgcactacacctaaatgagaccata

SEQ ID NO: 257 - DNA, 4588 bp, synthetic construct
  source 1..4588: mol_type = other DNA
ataggtctcacacattaaaacagcctgtgggttgatcccacccacaggcccattgggcgctagcactctggtatcacggtacctttgtgcgcctgttttataccccctcccccaactgtaacttagaagtaacacacaccgatcaacagtcagcgtggcacaccagccacgttttgatcaagcacttctgttaccccggactgagtatcaatagactgctcacgcggttgaaggagaaagcgttcgttatccggccaactacttcgaaaaacctagtaacaccgtggaagttgcagagtgtttcgctcagcactaccccagtgtagatcaggtcgatgagtcaccgcattccccacgggcgaccgtggcggtggctgcgttggcggcctgcccatggggaaacccatgggacgctctaatacagacatggtgcgaagagtctattgagctagttggtagtcctccggcccctgaatgcggctaatcctaactgcggagcacacaccctcaagccagagggcagtgtgtcgtaacgggcaactctgcagcggaaccgactactttgggtgtccgtgtttcattttattcctatactggctgcttatggtgacaattgagagatcgttaccatatagctattggattggccatccggtgactaatagagctattatatatccctttgttgggtttataccacttagcttgaaagaggttaaaacattacaattcattgttaagttgaatacagcaacatgtttgtgtttctggtgctgctgcctctggtgtcctctcagtgtgttaacctgaccaccagaacccaactgccccccgcctacactaactctttcactcgcggcgtgtactaccccgataaagttttcagatcctccgtgctccattctacccaagacctgttcttaccctttttctccaacgtgacctggttccacgccatccacgtgtccggcactaacggaaccaagcgcttcgataatcccgtgctgcctttcaacgacggagtttactttgcttccaccgagaagtccaatattatccggggctggatcttcggcaccacactggattccaaaacccagtccttactgattgtgaacaacgccactaacgtggtgatcaaggtgtgtgagttccagttctgtaacgacccctttctgggcgtgtattatcataaaaacaacaagtcctggatggagtccgagtttagagtgtattcttccgctaacaactgcaccttcgaatacgtgtcccagcctttcctgatggatctggaaggaaagcagggcaacttcaagaacttacgcgagttcgtgttcaagaacatcgacggctacttcaaaatttactccaagcacacccctatcaacttagtgagagatctgccccagggcttctccgctctggaacctctggtggacttacccattggcatcaacatcactcgcttccaaacactgctcgctctgcaccgctcttatctgacccccggcgactcctcttctggctggaccgccggcgccgctgcctattacgtgggatacctgcaaccccgcacctttctgctgaaatacaacgaaaacggcaccatcacagacgctgtggactgcgctctggaccccctgtccgagactaagtgcaccctgaagtccttcaccgttgaaaagggcatttatcagacttccaacttccgcgtgcagcctactgagtccattgtgcgcttccctaacatcactaacttgtgtcctttcggcgaagtgttcaacgctactcgcttcgcctccgtgtacgcctggaaccgcaagagaatctccaattgcgtggccgactactctgttctctacaactctgcctccttctccacctttaagtgctacggcgtgtcccccaccaaactgaacgacctgtgcttcaccaacgtgtacgccgactcctttgtgatcagaggcgacgaggtgcgccagatcgcccccggccagactggcaagatcgccgattacaattacaagctgcctgacgactttaccggctgcgtgattgcctggaactccaacaacctggactccaaagtgggcggcaactacaactacctgtaccgcctgtttagaaaatccaacctgaagcccttcgagcgggacatttctactgagatctaccaggccggctccaccccctgtaacggcgtggaaggcttcaactgctactttcccctgcagtcctacggcttccagcctaccaacggcgtgggctaccagccctaccgcgtggtggtgttatccttcgagctgctgcacgcccctgccaccgtgtgcggacccaaaaagtctactaacctggttaagaataagtgtgttaatttcaattttaacggcttaaccggaaccggagtgctgaccgagtccaataaaaagttcctgccctttcagcagtttggccgcgacatcgccgatactaccgacgccgtgcgcgatccccagaccctggagatcctggacattaccccctgctctttcggcggagtgtccgtgatcacccccggcaccaatacctccaatcaggtggccgttctgtaccaggacgtgaattgcaccgaagtgcccgtggccattcacgccgaccagttaactcctacttggagagtgtactccaccggctctaacgtgtttcagacccgcgccggctgtctgatcggcgccgagcacgtgaacaactcctacgagtgcgacattcccattggcgccggcatctgcgcctcctaccaaacccagactaactctcccagacgcgcccgctctgtggcctctcagtccatcatcgcttacactatgtccctgggcgccgagaactccgtggcctattccaacaactccatcgccatccccactaacttcaccatctctgtgaccaccgaaatcctccccgtgtctatgactaagacttccgtggactgtaccatgtacatttgcggcgactccaccgagtgttccaatctgctgctgcagtacggctccttttgcacccagctgaaccgcgccctgaccggcatcgctgttgagcaggacaagaatacccaggaggtgtttgctcaggtgaagcaaatctataagacccctcccatcaaggactttggcggcttcaacttttcccagatcctgcccgacccttccaagccctccaaacgctctttcatcgaagatctgctgttcaataaagtgaccctggccgacgccggcttcatcaagcagtacggagactgtctgggagacattgctgctcgcgacctgatttgcgcccagaagttcaacggcctgaccgtgctgccccctctgctgaccgacgagatgatcgctcagtacacctccgccctgctggctggcactatcacctccggctggactttcggcgctggcgccgccctgcagattcccttcgccatgcagatggcttatcgcttcaacggaatcggagtgacacagaacgtgctgtacgagaatcagaaactgatcgctaaccagtttaattccgccattggcaagatccaggactccctgtcctctactgcttccgccctgggcaagctgcaggacgtggtgaaccagaacgcccaggctctgaacaccctggtgaagcaactgtcttctaactttggagccatttcttccgtgctgaacgacatcctgtccagactggatcctcctgaggccgaggtgcagatcgaccgcctgatcactggccgcctgcagtccctgcagacttacgttacccagcaattaatccgcgctgccgagatccgcgcctccgccaacctggccgccaccaagatgtccgagtgcgttctgggccagtccaaacgcgttgacttctgcggcaagggctaccacctgatgtccttcccccagtccgctccccacggagtggtgttcctgcacgtgacctacgtgcctgcccaggagaagaacttcaccaccgcccccgccatttgccacgacggaaaggcccacttcccccgcgagggagtgttcgtttctaacggcactcactggttcgtgacccagagaaacttctacgagccccagattattaccaccgacaataccttcgtttctggcaactgcgacgtggttatcggcatcgtgaacaacaccgtgtacgaccccctgcaacccgagctggattctttcaaggaggagctggataagtactttaaaaaccatacctcccccgacgtggacctgggcgacatctctggcatcaacgcctccgtggtgaatatccagaaggagatcgatcgcctgaacgaggtggccaagaacttaaacgaatctctgatcgacctgcaggagctgggcaagtacgagcagtatattaagtggccctggtatatctggttaggctttatcgccggcctgatcgccattgttatggtgaccatcatgctgtgctgcatgacctcctgctgttcctgtttaaaaggctgctgctcctgcggatcctgctgtaaattcgacgaagacgactccgagcccgtgctgaaaggagttaagttacactatacctaaatgagaccata

SEQ ID NO: 258 - DNA, 4588 bp, synthetic construct
  source 1..4588: mol_type = other DNA
ataggtctcacacattaaaacagcctgtgggttgatcccacccacaggcccattgggcgctagcactctggtatcacggtacctttgtgcgcctgttttataccccctcccccaactgtaacttagaagtaacacacaccgatcaacagtcagcgtggcacaccagccacgttttgatcaagcacttctgttaccccggactgagtatcaatagactgctcacgcggttgaaggagaaagcgttcgttatccggccaactacttcgaaaaacctagtaacaccgtggaagttgcagagtgtttcgctcagcactaccccagtgtagatcaggtcgatgagtcaccgcattccccacgggcgaccgtggcggtggctgcgttggcggcctgcccatggggaaacccatgggacgctctaatacagacatggtgcgaagagtctattgagctagttggtagtcctccggcccctgaatgcggctaatcctaactgcggagcacacaccctcaagccagagggcagtgtgtcgtaacgggcaactctgcagcggaaccgactactttgggtgtccgtgtttcattttattcctatactggctgcttatggtgacaattgagagatcgttaccatatagctattggattggccatccggtgactaatagagctattatatatccctttgttgggtttataccacttagcttgaaagaggttaaaacattacaattcattgttaagttgaatacagcaacatgttcgtgttcctggtgctgctgcccctggtgtcctcccagtgcgtcaacctgaccacccggacccaactgccccctgcctataccaattccttcacccggggcgtctactaccccgacaaggtgttccggtcctctgtgctccactccacccaggacctcttcctcccctttttctccaacgtgacctggttccacgccatccacgtgtctggcacaaacggaaccaagcgcttcgacaaccctgtgctccccttcaacgacggcgtgtacttcgcctccaccgagaagtccaacatcatccgcggctggatcttcggcaccaccctcgactctaagacccagtccctgctgattgtgaataacgccaccaacgtggtgatcaaggtgtgcgaatttcagttctgcaacgaccccttcctgggcgtttactaccataagaacaacaagtcctggatggagtccgagttccgggtgtattcctctgccaataactgcacctttgagtacgtgtcccagcccttcctgatggacctggagggcaagcagggcaattttaaaaacctgcgcgagttcgtgttcaagaacatcgacggctacttcaagatctattccaagcacacccctatcaacctggtgcgcgacctgccccagggcttttccgctctggagcccctggttgacctgcccatcggcatcaacatcacccgcttccagactttactggccctgcaccgctcctacctgacccccggcgattcctcttctggctggacagccggagccgctgcctactacgtgggatacctgcagccccgcaccttcctgctgaagtacaacgagaacggaaccattacagacgctgtcgactgtgctctggatcccctgtccgaaacaaagtgcaccctgaagtccttcaccgtggagaagggcatctaccagacctccaacttccgcgtgcagcccaccgagtccatcgtgagattccccaacatcactaacctgtgccccttcggcgaggtgttcaacgccacccgcttcgcctccgtgtacgcctggaaccgcaagcgcatctccaactgcgttgccgactactctgtgctctacaactccgcctccttctccaccttcaagtgctacggcgtgtcccccaccaagctgaacgacctgtgcttcaccaacgtgtacgccgactccttcgtgatccgcggcgacgaggtgcgccagatcgcccccggccagaccggaaagatcgccgattacaattacaagctgcccgacgacttcaccggctgcgtgatcgcctggaactccaacaatctggactccaaggttggcggcaactacaactacctgtaccgcctgttccgcaagtccaacctgaagcccttcgagcgggacatttccacagagatttaccaggctggctccaccccctgtaacggagtggagggcttcaactgctacttccccctgcagtcctacggcttccagcccaccaacggcgtgggctaccagccctaccgcgtggtggtgctgtccttcgagctgctgcacgcccctgccaccgtgtgcggccccaagaagtccaccaacctggtgaagaacaagtgcgtgaacttcaacttcaacggactgacaggcaccggcgtgctgaccgagtccaacaagaagttcctgcccttccagcagttcggccgggacattgccgacaccaccgacgccgtgcgcgacccccagaccctggagatcctggacatcaccccctgctccttcggcggagtgtccgtgatcacccccggcaccaacacctccaaccaggttgccgtgctgtaccaggacgttaactgcaccgaggtgcccgtggccatccacgccgaccagctgacccccacctggcgcgtgtactccaccggctccaacgtgttccagacccgcgccggctgcctgatcggcgccgagcacgtgaacaactcctacgagtgcgacatccccattggcgccggcatctgcgcctcctaccagacccagaccaactcccctcgccgcgcccggtccgtcgcctcccagtccatcatcgcctacaccatgtccctgggcgccgagaactccgtggcctactccaacaactccattgccatccccaccaacttcaccatctccgtgaccaccgaaatcctccccgtgtccatgaccaagacctccgtggactgcaccatgtacatctgcggcgactccaccgagtgctccaacctgctgctgcagtacggctccttctgcacccagctgaatcgcgccctgaccggcatcgccgtggagcaggacaagaacacccaagaggtgttcgcccaggtgaagcagatctacaagacacctcccatcaaggacttcggcggcttcaacttctcccagatcctgcccgacccctccaagccctccaagcgctccttcatcgaggacctgctgttcaacaaggtgaccctggccgacgccggcttcatcaagcagtacggcgactgtctgggagacattgccgcccgcgacctgatctgcgcccagaagttcaacggcttaaccgtgctgccccctctgctgaccgacgagatgatcgcccagtacacatccgctctgctggccggcaccatcacctccggctggacctttggcgctggcgctgccctgcagatccccttcgctatgcagatggcctaccgcttcaacggcatcggcgtgacccagaacgtgctgtacgagaaccagaagctgatcgccaaccagttcaactccgccatcggcaagatccaggactccctgtcctccaccgcctccgccctgggcaagctgcaggacgtggtgaaccagaacgcccaggccctgaacaccctggtgaagcagctgtcctctaacttcggcgccatctcctccgtgctgaacgacattctgtcccgcctggatcctcctgaggccgaggtgcaaatcgatcgcctcatcaccggccgcctgcagtccctgcagacctacgtgacacagcagctgatccgcgccgccgagatccgcgcctccgccaacctggccgccaccaagatgtctgagtgcgtgctgggccagtccaaacgcgttgacttctgcggcaagggctaccacctgatgtccttcccccagtccgccccccacggcgtggtgttcctgcacgtgacctacgtgcccgcccaggagaagaacttcactaccgcccccgccatctgccacgacggcaaggcccacttcccccgcgagggcgtgttcgtgtccaacggcacccactggttcgtgacccagcgcaacttctacgagccccagatcatcaccaccgacaacaccttcgtgtccggcaactgcgacgtggtgattggcatcgtgaacaacaccgtgtacgaccccctgcagcccgagctggactccttcaaggaggagctggacaagtactttaagaaccacacctcccccgacgtggacctgggcgacatctccggcatcaacgcctccgtggtgaacatccagaaggagatcgaccgcctgaacgaggtggccaagaacctgaacgagtccctgatcgacctgcaggagctgggcaagtacgaacagtacatcaagtggccctggtacatctggctgggcttcatcgccggcctgatcgccatcgtgatggtgaccatcatgctgtgctgcatgacctcttgctgttcctgtctgaagggctgctgctcctgcggctcctgctgcaagttcgacgaggacgactccgagcccgtgctgaagggcgtgaagctgcactacacctaaatgagaccata

SEQ ID NO: 259 - DNA, 4588 bp, synthetic construct
  source 1..4588: mol_type = other DNA
ataggtctcacacattaaaacagcctgtgggttgatcccacccacaggcccattgggcgctagcactctggtatcacggtacctttgtgcgcctgttttataccccctcccccaactgtaacttagaagtaacacacaccgatcaacagtcagcgtggcacaccagccacgttttgatcaagcacttctgttaccccggactgagtatcaatagactgctcacgcggttgaaggagaaagcgttcgttatccggccaactacttcgaaaaacctagtaacaccgtggaagttgcagagtgtttcgctcagcactaccccagtgtagatcaggtcgatgagtcaccgcattccccacgggcgaccgtggcggtggctgcgttggcggcctgcccatggggaaacccatgggacgctctaatacagacatggtgcgaagagtctattgagctagttggtagtcctccggcccctgaatgcggctaatcctaactgcggagcacacaccctcaagccagagggcagtgtgtcgtaacgggcaactctgcagcggaaccgactactttgggtgtccgtgtttcattttattcctatactggctgcttatggtgacaattgagagatcgttaccatatagctattggattggccatccggtgactaatagagctattatatatccctttgttgggtttataccacttagcttgaaagaggttaaaacattacaattcattgttaagttgaatacagcaacatgttcgtgttcctggtgctgctccccctggtgagctcccagtgcgtcaacctgaccacacggacccagctgccccccgcctataccaacagcttcacccgcggcgtctactaccccgacaaggtgttccggagcagcgtgctgcacagcacccaggacctcttcctccccttttttagcaacgtgacctggttccacgccatccacgtgagtggcaccaacggcaccaagcggttcgacaaccctgtgctccccttcaacgacggcgtgtacttcgctagcacagaaaaaagtaacatcattcggggctggatcttcggcaccacactggatagcaaaacccagagcctgctgattgtgaataacgccaccaacgtggtgatcaaggtgtgcgagttccagttctgcaacgaccccttcctgggcgtgtactaccacaagaacaacaagagctggatggagagcgagttccgcgtgtatagctctgccaacaactgcaccttcgagtacgtgagccagcccttcctgatggacctggagggcaagcagggcaatttcaaaaacctgcgggagttcgtgttcaagaacatcgacggctacttcaagatctacagcaagcacacccccatcaacctggtgcgggacctgccccagggctttagcgctctggagcccctggtggacctgcccatcggcatcaacatcacccgcttccaaaccctgttggccctgcaccggagctacctgacccctggcgatagcagtagtggctggacagccggagccgccgcctactacgtgggatacctgcagccccggaccttcctgctgaagtacaacgagaacggcacaatcacagacgccgtggactgcgccctggaccccctgagcgaaacaaagtgcaccctcaaaagtttcaccgtggagaagggcatctaccagaccagcaacttccgggtgcagcccaccgagagcatcgtgcggttccccaacatcaccaacctgtgccccttcggcgaggtgttcaacgccacccggttcgccagcgtgtacgcctggaaccggaagcggatcagcaactgcgtggccgactacagcgtgctgtataacagtgccagcttcagcaccttcaagtgctacggcgtgagccccaccaagctgaacgacctgtgcttcaccaacgtgtacgccgacagcttcgtgatccggggcgacgaggtgcggcagatcgcccccggccagaccggcaagatcgccgattacaattacaagctgcccgacgatttcaccggctgcgtgatcgcctggaacagcaacaacctggacagcaaggtgggcggcaactacaactacctgtaccggctgttccgcaaaagtaacctgaagcccttcgagcgggacatcagcaccgagatctaccaggccggcagtaccccttgcaacggcgtcgagggcttcaactgctacttccccctgcagagctacggcttccagcccaccaacggcgtgggctaccagccctaccgggtggtggttctgagcttcgagctgctgcacgcccctgccaccgtgtgcggccccaagaaaagcaccaacctggtgaagaacaagtgcgtgaatttcaattttaacggactcaccggaaccggcgtgctgaccgagagcaacaagaagttcctgcccttccagcaattcggccgggatattgccgacaccactgacgccgtgcgggacccccagaccctggagatcctggacatcacaccctgtagcttcggcggggtgagcgtgatcacccccggcaccaacaccagcaaccaggtggccgtgctgtaccaggacgtgaactgcaccgaggtgcccgtggccatccacgccgaccagctgacccccacctggcgggtgtacagcaccggcagcaacgtgttccagacccgggccggctgcctgatcggcgccgagcacgtgaataacagctacgagtgcgacatccccatcggagccggaatctgcgccagctaccagacccagaccaacagcccccggagagcccggagcgtggccagccagagcattattgcctacaccatgagcctgggcgccgagaacagcgtggcctacagcaacaatagtattgccatccccaccaacttcaccatcagcgtgaccaccgaaatcctccccgtgagcatgaccaagaccagcgtggactgcaccatgtacatctgcggcgacagcaccgagtgcagcaacctgctcctgcagtacggcagcttctgcacccagctgaaccgggccctgaccggaattgccgtggagcaggacaagaacacccaggaggtgttcgcccaggtgaagcagatctacaagacacctcccatcaaggacttcggcggcttcaacttcagccagatcctgcccgaccccagcaagcccagcaagcggagcttcatcgaggacctgttgttcaacaaggtgaccctggccgacgccggcttcatcaagcagtacggcgactgtctgggagatattgccgcacgggacctgatctgcgcccagaagttcaacggcctgaccgtgctgcccccactgctgaccgacgagatgatcgcccagtacacaagcgctctgctcgccggcaccatcaccagcggctggaccttcggcgccggcgctgccctgcagatccccttcgccatgcagatggcctaccggttcaacggcatcggcgtgacccagaacgtgctgtacgagaaccagaagctgatcgccaaccagttcaacagcgccatcggcaagatccaggacagcctgagctccaccgccagcgccctgggcaagctgcaggacgtggtgaaccagaacgcccaggccctgaacaccctggtgaagcagctgagcagcaacttcggcgccatcagctctgtgctgaacgacatcctgagccggctggatcctcctgaggccgaggtgcaaatcgatcggctcatcaccggccggctgcagagcctgcagacctacgtgacacagcagctgatccgggccgccgagatccgggccagcgccaacctggccgctaccaagatgagcgagtgcgtgctgggccagagcaagcgggtggacttctgcggcaagggctaccacctgatgagcttcccccagagcgccccccacggcgtggtgttcctgcacgtgacctacgtgcccgcccaggagaagaacttcaccaccgcccccgccatctgccacgacggcaaggcccacttcccccgggagggcgtgttcgtgagcaacggcacccactggttcgtgacccagcggaacttctacgagccccagatcataaccacagacaacaccttcgtgagcggcaactgcgacgtggtcatcggcatcgtgaacaacaccgtgtacgaccccctgcagcccgagctggacagcttcaaggaggaactggacaagtacttcaagaaccacaccagccccgacgtggacctgggcgacatcagcggcatcaacgccagcgtggtgaacatccagaaggagatcgaccggctgaacgaggtggccaagaacctgaacgagagcctgatcgacctgcaggagctgggcaagtacgagcagtacatcaagtggccctggtacatctggctgggctttattgccggcctgatcgccatcgtgatggtgaccatcatgctgtgctgtatgacaagctgttgcagttgcctgaagggctgctgcagctgcggcagctgctgcaagttcgacgaggacgacagcgagcccgtgctgaagggcgtgaagctgcactacacctaaatgagaccata

SEQ ID NO: 260 - DNA, 4057 bp, synthetic construct
  source 1..4057: mol_type = other DNA
ataggtctcacacactagggcgcgccagtcctcaagctgggcctgacacaactgtgttcactagcaactactcccagacaccatggtactcccgactcctgaggtactccctgccgttactgccctgtggggcaaggtgatactccctgaagttggtggtgaggccctgggcaggctactcccggtctacccttggacccagaggtcgactcggaccggccaccatgtttgttttcttagttttattacctttagtttcttcccagtgtgttaatttaactactagaactcaattacctcctgcttatactaattcttttactagaggagtgtattatcctgataaggtttttagatcttctgttctgcactctactcaggatttgttcttgcccttcttctctaacgtgacctggttccacgctattcacgtttctggaaccaacggcactaagagatttgataatcccgttttgccttttaacgacggagtttatttcgcctctaccgaaaaatctaacatcattaggggctggatctttggaactaccctggattctaaaactcaatctttattgattgtgaataacgctaccaacgttgtgattaaagtttgtgaatttcaattttgtaacgatccttttctgggagtttattatcataaaaacaataaatcttggatggaatctgaattccgcgtttattcttctgccaataactgtacctttgagtacgtttctcaacctttcttaatggatttagaaggaaaacaaggcaatttcaaaaacttaagagaatttgtttttaaaaatattgacggatattttaaaatttattctaagcatactcctattaatttagtgagagacttaccccaaggattttctgctttagaacctttagttgacttacctattggaatcaatatcactagatttcaaactttattagctttacatagatcttatttaactcctggagattcttcctccggctggacagccggagccgctgcttattacgttggatatttacagcctagaacttttctgctgaaatataacgaaaacggaaccattaccgacgccgttgactgtgctctggatcctttatctgaaaccaagtgtactttaaaatcttttaccgttgaaaaaggaatttatcaaacttctaattttagagttcaacctactgaatctatcgttagattccctaatattactaatttgtgtccctttggagaggttttcaacgctactagatttgcctctgtttacgcttggaatcgcaagagaatttctaattgtgtggccgattactccgttttgtataactctgcttctttctctacttttaagtgttacggagtttcccctactaaactgaacgatttgtgttttactaacgtttacgctgattcttttgttattagaggcgacgaagttagacaaattgctcctggacaaactggaaagattgctgactataactataaactgcctgacgattttaccggctgtgttattgcttggaattctaataatttagattctaaagttggaggaaattataattatttatatagattatttagaaaatctaatttaaaaccttttgaaagagatatttccactgagatttaccaggctggatctactccttgtaacggcgttgagggatttaattgttattttcctttacaatcttacggatttcaacctaccaacggagttggatatcaaccttacagagttgtggtgctgtcttttgaattattacacgctcccgctactgtttgcggccctaaaaagtctactaatctggttaagaataagtgtgtgaattttaatttcaacggattgaccggaactggagttctgactgaatctaataaaaaatttttaccctttcaacaatttggaagggatatcgctgatactactgacgctgttagagatcctcaaactttagaaatcctggatattactccttgttcttttggaggagtttccgttattactcctggcactaatacttctaatcaagttgctgttttatatcaagacgttaattgcaccgaagttcctgttgctattcacgctgatcagttaactcctacttggagagtttattctactggatctaacgtttttcaaaccagagctggctgtttaatcggagctgaacacgtgaataattcttacgagtgcgatattcccatcggagctggaatttgtgcctcttatcaaactcaaaccaattctcctaggagggctagatccgttgcctctcaatctattattgcttataccatgtctttaggagctgaaaattccgttgcttactctaacaattctattgctattcctactaactttactatttctgttactactgaaattctgcccgtgtccatgactaaaacttctgttgattgtactatgtatatttgtggagattccactgagtgttctaacctgttattacaatacggatctttttgtactcaattaaatagagctctgactggaattgctgttgaacaggacaaaaatactcaagaagtttttgcccaagttaaacagatttataaaactcctcctattaaagattttggaggatttaatttctctcaaattttacctgacccttctaagccttccaaaaggtctttcatcgaagatttattatttaataaagttaccttagccgacgctggatttattaagcaatacggagattgcttaggcgatatcgctgctagagacttaatttgtgctcaaaaatttaacggattaactgttttacctcccctgttaactgacgaaatgatcgctcaatatacttctgctctgttagctggaactattacttctggctggacttttggagctggagctgctttacaaattccctttgctatgcagatggcttatagatttaacggaattggagttactcaaaacgttttatacgaaaatcaaaaattaattgctaatcaatttaattctgctattggaaaaattcaagattccctgtcttctactgcttccgctctgggaaaattacaagacgttgttaatcaaaacgctcaagctttgaataccttagttaaacaattatcttccaattttggagctatttcttctgttttaaacgacattttatctagattagatccccctgaagctgaagttcagattgacagattgattaccggaagattacaatctttacaaacttacgttactcaacaactgattagagctgctgaaattagagcctctgctaatttagctgctactaagatgtctgagtgtgttttaggacagtccaaaagagttgatttttgtggaaaaggctatcatctgatgtcttttcctcaatctgctcctcacggagttgtgtttttacacgttacttacgttcctgctcaagagaagaattttactactgctcctgctatttgtcacgacggaaaagctcattttcctagagaaggagtttttgtttctaacggaactcattggtttgttactcaaagaaacttttacgaacctcagattattaccactgataatacctttgtttctggcaattgtgacgtggttattggaattgttaataatactgtttacgatcctttacaacccgaactggattcttttaaagaagaattagataaatactttaaaaatcatacttctcccgacgttgatttaggagatatctctggaattaacgcttctgttgtgaatattcaaaaggaaattgatagattaaacgaagtggctaaaaatttaaacgagtctttaattgatttacaggaactgggaaaatacgaacaatatattaagtggccttggtacatttggttaggctttattgctggactgattgctattgtgatggttactatcatgttgtgttgcatgacttcttgttgttcctgtttaaaaggctgttgctcttgtggatcttgttgcaaatttgacgaagacgattctgaacctgttctgaaaggagttaaactgcattatacttaaatgagaccata

SEQ ID NO: 261 - DNA, 4057 bp, synthetic construct
  source 1..4057: mol_type = other DNA
ataggtctcacacactagggcgcgccagtcctcaagctgggcctgacacaactgtgttcactagcaactactcccagacaccatggtactcccgactcctgaggtactccctgccgttactgccctgtggggcaaggtgatactccctgaagttggtggtgaggccctgggcaggctactcccggtctacccttggacccagaggtcgactcggaccggccaccatgttcgtgttcttagtgctgttacccctggtttcttctcagtgtgtcaatttaaccaccagaacccaactgcctcctgcctatactaattcctttacccgcggagtttactatcccgataaggtttttcgctcctctgttttacactctactcaggacttattcttacccttcttctccaacgttacttggtttcacgccattcacgtttctggaaccaacggaactaagagattcgataatcctgtgttacctttcaacgacggagtttattttgcttccactgaaaaatccaatatcattaggggctggatctttggaaccactttagattccaagactcaatctttattaattgtgaataacgccaccaacgtggttatcaaagtgtgtgaattccaattttgtaacgaccctttcttaggcgtgtattatcacaaaaataataaatcttggatggaatctgaatttcgcgtttactcttccgctaacaactgcacttttgagtacgtttcccagccttttctgatggatctggaaggcaaacagggaaattttaaaaatctgagagaatttgtttttaagaacattgacggatatttcaagatctattctaaacacactcccatcaatttggttagagatttacctcagggcttttctgctttagaacctttagttgacctgcctattggaatcaacattactagatttcaaactctgttagctctgcatagatcttatttaactcctggagattcctcctccggctggaccgccggagctgctgcttattacgttggctatttacaacccagaacttttctgttaaaatataacgaaaacggcaccatcactgacgccgtggattgtgctttagatcccttatccgaaactaagtgtactctgaaatccttcactgttgaaaaaggaatttatcagacctctaattttagagtgcaacctaccgaatctattgttagatttcctaatattaccaacttgtgcccttttggcgaagttttcaacgctactagatttgcttctgtttacgcttggaatagaaaaagaatttctaactgtgtggctgactattccgtgttatacaattctgcctctttttctacttttaagtgttacggagtgtctcccactaaactgaacgatttgtgctttaccaacgtttacgctgattcttttgttattagaggcgacgaggttcgccagattgcccctggccagactggcaaaattgctgactataactataaattacctgacgattttaccggctgcgttatcgcttggaactctaataatctggattctaaagttggaggaaactacaattatttatatagattatttagaaaatctaatttaaaacccttcgagagggatatctctactgaaatctaccaagctggatctactccttgcaacggcgttgaaggatttaattgttattttcctttacaatcttacggattccaacctactaacggagttggatatcagccttatagagtggtggttttatctttcgaattattacacgctcccgctactgtgtgtggacccaaaaagtctactaatttagttaaaaataagtgtgttaatttcaattttaacggactcactggcactggagtgttaactgaatctaataaaaagttcttacctttccaacagttcggacgcgacattgccgacaccactgacgctgtgagagatcctcaaaccttagagattctggatattaccccttgttcctttggaggcgtttccgttatcactcccggaactaacacttctaatcaggttgccgttttatatcaggacgttaattgcactgaagttcctgttgctattcacgctgatcaactgactcctacttggagagtttattccactggatctaacgtttttcagactcgcgccggctgtttaattggagctgaacacgtgaacaactcctacgagtgcgatattcctattggcgctggcatctgtgcttcttatcaaactcaaactaattctcccaggagggctcgctctgttgcttcccaatctatcattgcttatactatgtccttaggcgctgaaaattctgttgcttattccaacaattctattgctattcccaccaattttactatttctgtgactactgaaattttacctgtttccatgactaagacttctgttgattgtactatgtatatctgcggagattctactgagtgttccaacctcttattacagtacggatctttttgcactcagttaaatagagctctgactggaatcgctgttgaacaagacaaaaacacccaagaagtgtttgctcaggtgaagcaaatttacaagacacctcctattaaggattttggaggattcaatttttcccagattttacctgatccttctaaaccttctaaacgctcctttattgaagatttactgttcaataaagtgactctggctgacgctggcttcatcaagcaatacggcgattgtttaggagacatcgctgctagagacttaatttgtgctcaaaaattcaacggactgactgttctgccccctttactgaccgacgagatgatcgcccaatatacttctgccctgttagctggcaccattacttctggctggacctttggagctggcgctgctttacaaattcctttcgccatgcagatggcttatcgctttaacggaattggcgttacccaaaacgtgttatacgagaatcaaaaattaatcgccaatcaatttaattctgctattggcaagattcaagattctttatcttctactgcttccgccctgggcaaactgcaggacgttgttaaccagaacgctcaagccctgaacactttagtgaagcaactgtcttctaacttcggcgctatttcttccgttttaaacgacattctgtctcgcttagatccccctgaggctgaggttcaaattgatagactgattactggaagattacagtccctgcaaacttacgttactcaacagttaatcagagctgctgaaatccgcgcttccgctaatttagctgctactaaaatgtctgagtgtgtgttaggccagtctaagagagttgacttttgtggcaagggctatcatttaatgtcttttcctcagtccgctcctcacggcgttgtgttcttacacgtgacttacgttcccgcccaagagaaaaattttaccactgctcctgctatttgtcacgacggaaaagctcattttcctagagaaggagtgtttgtttctaacggaacccactggtttgtgactcaaagaaacttttacgaaccccaaattattactactgacaatactttcgtttccggcaactgtgacgtggtgatcggaattgttaataacaccgtttacgatcccttacaacctgaattagattcttttaaagaagaattagataaatatttcaaaaatcatacttcccctgacgttgatctgggagatatttctggaattaacgcttctgtggtgaacattcaaaaagagattgacagattaaacgaagttgctaaaaacctgaacgagtccctgatcgacctgcaggaactgggaaaatacgagcagtatattaagtggccttggtatatttggttaggatttattgctggattaattgctattgtgatggtgaccattatgttgtgctgtatgacctcttgttgttcttgcctgaagggctgctgttcttgtggctcttgttgcaagtttgacgaagacgattccgaacccgttttaaagggagtgaaactgcattatacttaaatgagaccata

SEQ ID NO: 262 - DNA, 4057 bp, synthetic construct
  source 1..4057: mol_type = other DNA
ataggtctcacacactagggcgcgccagtcctcaagctgggcctgacacaactgtgttcactagcaactactcccagacaccatggtactcccgactcctgaggtactccctgccgttactgccctgtggggcaaggtgatactccctgaagttggtggtgaggccctgggcaggctactcccggtctacccttggacccagaggtcgactcggaccggccaccatgtttgtttttctggttttattacccttagtgtcctcccagtgcgtgaacttaactacccgcactcagctgcctcctgcctataccaactctttcactagaggcgtttactatcctgacaaagtttttagatcttctgtgctgcattccactcaagatttattcctgcccttcttttctaacgttacttggtttcacgccatccacgtgtctggcaccaacggaaccaaacgctttgacaaccctgtgttaccttttaacgacggagtttacttcgcctccactgaaaagtccaatattatccggggctggattttcggaaccaccttagattctaaaacccagtctctgctgattgtgaacaacgccactaacgtggttattaaagtgtgcgagtttcaattttgcaacgacccttttctgggagtttattaccacaaaaataacaaatcttggatggagtctgaatttagagtgtattcttccgccaataattgcaccttcgagtacgtttcccaaccctttctgatggacttagaaggaaagcaaggcaatttcaaaaacctgcgcgaatttgtgttcaaaaatattgacggctatttcaaaatttactccaagcatacccctattaatttagtgcgcgatctgcctcagggcttctctgccttagagcctttagtggacctgcctattggcattaatattactcgctttcagactttactggccctgcatagatcttatttaactcctggagactcttcttccggctggaccgctggagccgctgcctactacgttggctatctgcagcctagaacttttttattaaagtacaacgaaaacggaaccatcactgacgctgttgattgcgccctggatcctttatctgaaacaaagtgcaccctgaagtccttcaccgttgaaaagggcatttaccaaacatccaattttagggttcagcctactgaatccatcgtgcgctttcccaacatcactaacttgtgtccctttggcgaggtgtttaacgccactcgctttgcctctgtgtacgcctggaacagaaagagaatttccaattgcgtggctgattattctgtgctgtataactccgcttctttctccacctttaagtgttacggagtgtcccctactaaactgaacgacttgtgcttcaccaacgtttacgccgattcttttgtgattcgcggcgacgaagttagacaaatcgcccccggacagaccggaaagatcgctgattacaactataagttacctgacgacttcaccggctgcgtgattgcttggaattctaataacttagactctaaagttggaggcaactacaattacctgtatagattattccgcaaatctaacctgaaaccttttgagagagacatctccaccgaaatttaccaagccggctctaccccctgcaacggagttgaaggatttaattgctactttcccctgcagtcctacggattccaacctactaacggcgttggataccaaccttacagagttgtggtgctgtcttttgaattattacacgcccctgccaccgtttgtggccctaagaaatctaccaatctggttaaaaacaagtgtgtgaattttaattttaacggcctgaccggcactggcgttttaaccgagtctaacaagaagtttctgcctttccaacaatttggcagagacatcgccgacaccaccgacgctgtgcgcgatcctcaaaccttagaaattttagatattactccttgctctttcggcggcgtttccgttattactcctggaaccaatacctctaatcaagtggctgtgctgtaccaggacgttaattgcactgaagtgcctgtggctattcacgccgatcaactgacccccacttggagagtttattctactggatctaacgtgttccaaactagagctggctgtctgatcggcgccgagcacgttaataattcttacgagtgtgatatccctattggcgctggcatttgcgcctcttaccagacccagaccaactccccccgcagagctagatccgtggcctctcagtccattattgcctatactatgtccttaggagccgaaaattctgtggcttactccaacaattctattgccattcccactaattttactatctctgtgactaccgaaatcctgcccgtgtccatgactaagacctccgtggactgcaccatgtatatctgcggagactctactgagtgttccaacttattactgcagtacggctctttctgtactcagctgaatagagccctgactggaattgctgtggagcaagacaaaaatacccaggaggtgttcgctcaggtgaaacaaatttataagacccctcccatcaaagattttggaggcttcaatttttctcaaattctgcccgacccctccaagccttccaaaagatcctttattgaagatctgctgttcaataaggttactttagccgacgccggcttcattaagcagtacggagattgtctgggcgatattgctgcccgcgacctgatttgcgctcagaagttcaacggattaaccgttctgcctcctctgctgactgacgagatgattgctcagtatacttctgccctgctggctggaactattacctctggctggaccttcggcgccggagctgctctgcaaattcccttcgccatgcaaatggcttacagatttaacggcatcggagttactcaaaacgtgctgtacgaaaaccaaaaattaattgccaaccagttcaattccgctatcggcaaaattcaggattctctgtcttctactgcttccgctttaggcaaactgcaagacgttgttaaccagaacgcccaagctttaaacaccctggttaagcagctgtcctctaattttggcgctatctcttctgttctgaacgacattttatctagactggacccccctgaagccgaggtgcagattgatagattaatcaccggaagactgcaatccctgcagacctacgttacccagcaattaatcagagccgccgagatcagagcctctgccaacttagctgccaccaaaatgtccgagtgtgtgctgggacagtccaagcgcgtggacttctgtggaaagggataccacctgatgtcttttcctcaatctgctccccacggagttgtgtttctgcacgttacttacgtgcctgcccaagagaaaaactttactaccgcccccgctatttgccacgacggcaaggctcacttccctagagaaggagtttttgtgtctaacggaacccattggtttgtgactcaaagaaatttttacgagcctcaaatcattaccaccgataacacttttgtttccggcaattgtgacgtggtgattggaatcgttaacaacaccgtttacgaccctttacagcccgaattagactcttttaaagaggagttagataaatattttaaaaaccatacctctcccgacgtggacctgggagatatttccggaattaacgcttctgttgtgaatatccagaaagagatcgacagattaaacgaggttgctaaaaatttaaacgaatccctgattgacctgcaggagctgggcaaatacgaacaatatattaagtggccttggtatatttggttaggcttcatcgctggattaatcgctattgttatggtgactattatgttgtgttgtatgacttcctgctgttcttgcttaaaaggctgctgttcctgcggatcctgttgtaaattcgacgaggacgattccgagcctgttttaaaaggagtgaaattacattatacttaaatgagaccata

SEQ ID NO: 263 - DNA, 4057 bp, synthetic construct
  source 1..4057: mol_type = other DNA
ataggtctcacacactagggcgcgccagtcctcaagctgggcctgacacaactgtgttcactagcaactactcccagacaccatggtactcccgactcctgaggtactccctgccgttactgccctgtggggcaaggtgatactccctgaagttggtggtgaggccctgggcaggctactcccggtctacccttggacccagaggtcgactcggaccggccaccatgttcgtgttcctggtgctgctgcccttagtgtcctcccagtgtgtgaacctgaccaccagaacccagttacctcccgcttacaccaactcctttacccgcggagtgtactaccctgataaggtttttagatcctccgttctgcattctacccaagacctgtttttacccttcttttccaacgtgacctggttccacgctatccacgtgtccggcactaacggcactaagcgcttcgacaatcctgtgctcccttttaacgacggcgtgtacttcgcttctaccgaaaaatccaacatcatccgcggctggatcttcggaactaccctggattctaaaacccagtctttattaatcgtgaataacgccaccaacgtggttattaaggtctgtgagttccaattttgcaacgaccctttcttaggcgtttattaccacaaaaacaataagtcttggatggagtccgaattccgcgtgtactcctctgccaacaattgcacctttgagtacgtgtcccagcccttcctgatggacctggaaggcaagcagggcaattttaaaaatctgcgcgaattcgttttcaagaacatcgacggctactttaagatttattccaaacatacccccatcaacctggtgcgcgatttaccccagggcttctccgccttagagcccttagtggatctgcctatcggcatcaatatcacccgctttcagactctgctggccctgcacagatcctacctgactcccggagactcttcttctggctggaccgccggagctgccgcctactacgtgggctacctgcaaccccgcacctttctgctgaagtacaacgaaaacggcaccatcacagacgccgttgactgcgctctggaccccctgtctgagactaagtgcaccctgaagtccttcactgtggagaaaggaatctaccagacctccaacttccgcgtgcagcctaccgaatccattgttcgcttccctaacattactaatctgtgccccttcggagaagttttcaacgccactagattcgcttccgtgtacgcctggaatcgcaagcgcatctccaattgcgttgctgactactctgtgttatacaattccgcctctttttccactttcaagtgctacggcgtgtctcctaccaagctgaacgacctgtgtttcactaacgtgtacgctgattcctttgttatccgcggcgacgaggtgagacagatcgcccctggccagaccggaaaaatcgccgactacaactacaagttacccgacgattttaccggctgtgttattgcttggaactctaataatctggactctaaagtgggcggcaattacaactacttatatcgcctgttcagaaaatccaacctgaaacccttcgaacgggacatttccaccgaaatttatcaggccggctccaccccctgcaacggagtggagggcttcaattgctacttccccctgcaatcctacggctttcagcccaccaacggcgtgggataccagccctaccgcgttgttgtgttatcctttgaactgctgcacgctcctgctactgtgtgcggacctaaaaaatccaccaatctggtgaagaacaagtgtgtgaattttaattttaacggcctgaccggcaccggagtgctgaccgagtccaacaaaaagtttctgccctttcagcagttcggccgggacattgccgacactaccgacgctgtgagggatcctcagaccctggagattctggacattaccccttgctccttcggaggagtttccgtgatcacccctggcaccaatacttctaaccaagtggctgttttataccaggacgtgaattgtactgaggtgcctgtggccatccacgccgatcaattaactcccacctggagagtgtattccaccggctctaacgttttccaaacccgcgctggctgcttaatcggcgctgagcacgtgaacaactcctacgagtgtgatattcctatcggagccggcatctgtgcttcctaccagactcagaccaactcccccagacgcgctaggtccgtggcttcccagtctattatcgcttatactatgtccctgggagccgagaattctgttgcctattccaataactccatcgccattcctaccaactttaccatctctgtgaccaccgagattctgcccgtgtccatgaccaaaacttctgtggattgtaccatgtacatctgtggagattccaccgagtgctctaacctgctgctgcagtacggctccttttgcacccaattaaaccgcgctctgactggcatcgccgtggagcaagataaaaacacccaagaggtgttcgctcaggtgaagcagatctacaagacacctcccattaaagatttcggaggctttaatttctctcagatcctgcccgacccttctaagccctctaaacgctccttcatcgaggatctgctgttcaacaaggttaccctggccgacgctggctttatcaaacagtacggcgactgcttaggcgacatcgccgcccgcgatttaatttgcgctcagaagttcaacggactgaccgtgctgcctcctctgctgaccgacgaaatgatcgcccaatacacctccgccctgctggctggcactatcacctccggctggacctttggcgctggagccgctctgcaaatccctttcgctatgcagatggcttaccgctttaacggaatcggcgtgacccagaacgtgttatacgaaaatcagaaattaattgccaatcaatttaactctgccatcggcaagattcaggattctctgtcttctactgcctctgccttaggaaaactgcaggacgtggtgaatcagaacgcccaggccctgaataccctggttaagcaactgtcttccaatttcggcgctatctcctctgtgttaaacgacattctgtcccgcctggatcctcctgaggccgaagtgcaaattgaccgcttaatcactggcagactgcaatccctgcaaacctacgttactcaacagctgatcagagccgccgaaatccgcgcttctgccaacttagctgctaccaagatgtccgagtgcgtgctgggacagtccaaaagagttgacttttgcggaaagggctaccacctgatgtcctttccccagtccgccccccacggagttgttttcctgcacgttacttacgttcctgctcaagagaagaacttcaccaccgctcccgctatttgccacgacggcaaggctcatttccccagagagggagtgtttgtgtccaacggcactcactggtttgttactcagcgcaacttctacgaacctcagatcatcaccactgacaatacctttgtgtccggaaactgtgacgtggttatcggcattgtgaacaatactgtgtacgaccctttacaacctgagctggattcttttaaagaagaactggacaagtacttcaagaaccacacctcccccgacgtggatctgggcgacatctccggcatcaacgcctctgtggtgaatattcagaaggagattgatcgcctgaacgaggttgccaagaatctgaacgagtctctgatcgacctgcaggagctgggcaagtacgaacagtacatcaagtggccctggtacatttggctgggctttattgctggactgatcgctatcgttatggttaccatcatgctgtgctgtatgacctcttgctgctcctgtctgaaaggctgttgctcctgcggctcctgttgtaagtttgacgaggacgactccgagcctgttctgaaaggagttaaactgcactacacctaaatgagaccata

SEQ ID NO: 264 - DNA, 4057 bp, synthetic construct
  source 1..4057: mol_type = other DNA
ataggtctcacacactagggcgcgccagtcctcaagctgggcctgacacaactgtgttcactagcaactactcccagacaccatggtactcccgactcctgaggtactccctgccgttactgccctgtggggcaaggtgatactccctgaagttggtggtgaggccctgggcaggctactcccggtctacccttggacccagaggtcgactcggaccggccaccatgtttgtgtttctggtgctgctgcctctggtgtcctctcagtgtgttaacctgaccaccagaacccaactgccccccgcctacactaactctttcactcgcggcgtgtactaccccgataaagttttcagatcctccgtgctccattctacccaagacctgttcttaccctttttctccaacgtgacctggttccacgccatccacgtgtccggcactaacggaaccaagcgcttcgataatcccgtgctgcctttcaacgacggagtttactttgcttccaccgagaagtccaatattatccggggctggatcttcggcaccacactggattccaaaacccagtccttactgattgtgaacaacgccactaacgtggtgatcaaggtgtgtgagttccagttctgtaacgacccctttctgggcgtgtattatcataaaaacaacaagtcctggatggagtccgagtttagagtgtattcttccgctaacaactgcaccttcgaatacgtgtcccagcctttcctgatggatctggaaggaaagcagggcaacttcaagaacttacgcgagttcgtgttcaagaacatcgacggctacttcaaaatttactccaagcacacccctatcaacttagtgagagatctgccccagggcttctccgctctggaacctctggtggacttacccattggcatcaacatcactcgcttccaaacactgctcgctctgcaccgctcttatctgacccccggcgactcctcttctggctggaccgccggcgccgctgcctattacgtgggatacctgcaaccccgcacctttctgctgaaatacaacgaaaacggcaccatcacagacgctgtggactgcgctctggaccccctgtccgagactaagtgcaccctgaagtccttcaccgttgaaaagggcatttatcagacttccaacttccgcgtgcagcctactgagtccattgtgcgcttccctaacatcactaacttgtgtcctttcggcgaagtgttcaacgctactcgcttcgcctccgtgtacgcctggaaccgcaagagaatctccaattgcgtggccgactactctgttctctacaactctgcctccttctccacctttaagtgctacggcgtgtcccccaccaaactgaacgacctgtgcttcaccaacgtgtacgccgactcctttgtgatcagaggcgacgaggtgcgccagatcgcccccggccagactggcaagatcgccgattacaattacaagctgcctgacgactttaccggctgcgtgattgcctggaactccaacaacctggactccaaagtgggcggcaactacaactacctgtaccgcctgtttagaaaatccaacctgaagcccttcgagcgggacatttctactgagatctaccaggccggctccaccccctgtaacggcgtggaaggcttcaactgctactttcccctgcagtcctacggcttccagcctaccaacggcgtgggctaccagccctaccgcgtggtggtgttatccttcgagctgctgcacgcccctgccaccgtgtgcggacccaaaaagtctactaacctggttaagaataagtgtgttaatttcaattttaacggcttaaccggaaccggagtgctgaccgagtccaataaaaagttcctgccctttcagcagtttggccgcgacatcgccgatactaccgacgccgtgcgcgatccccagaccctggagatcctggacattaccccctgctctttcggcggagtgtccgtgatcacccccggcaccaatacctccaatcaggtggccgttctgtaccaggacgtgaattgcaccgaagtgcccgtggccattcacgccgaccagttaactcctacttggagagtgtactccaccggctctaacgtgtttcagacccgcgccggctgtctgatcggcgccgagcacgtgaacaactcctacgagtgcgacattcccattggcgccggcatctgcgcctcctaccaaacccagactaactctcccagacgcgcccgctctgtggcctctcagtccatcatcgcttacactatgtccctgggcgccgagaactccgtggcctattccaacaactccatcgccatccccactaacttcaccatctctgtgaccaccgaaatcctccccgtgtctatgactaagacttccgtggactgtaccatgtacatttgcggcgactccaccgagtgttccaatctgctgctgcagtacggctccttttgcacccagctgaaccgcgccctgaccggcatcgctgttgagcaggacaagaatacccaggaggtgtttgctcaggtgaagcaaatctataagacccctcccatcaaggactttggcggcttcaacttttcccagatcctgcccgacccttccaagccctccaaacgctctttcatcgaagatctgctgttcaataaagtgaccctggccgacgccggcttcatcaagcagtacggagactgtctgggagacattgctgctcgcgacctgatttgcgcccagaagttcaacggcctgaccgtgctgccccctctgctgaccgacgagatgatcgctcagtacacctccgccctgctggctggcactatcacctccggctggactttcggcgctggcgccgccctgcagattcccttcgccatgcagatggcttatcgcttcaacggaatcggagtgacacagaacgtgctgtacgagaatcagaaactgatcgctaaccagtttaattccgccattggcaagatccaggactccctgtcctctactgcttccgccctgggcaagctgcaggacgtggtgaaccagaacgcccaggctctgaacaccctggtgaagcaactgtcttctaactttggagccatttcttccgtgctgaacgacatcctgtccagactggatcctcctgaggccgaggtgcagatcgaccgcctgatcactggccgcctgcagtccctgcagacttacgttacccagcaattaatccgcgctgccgagatccgcgcctccgccaacctggccgccaccaagatgtccgagtgcgttctgggccagtccaaacgcgttgacttctgcggcaagggctaccacctgatgtccttcccccagtccgctccccacggagtggtgttcctgcacgtgacctacgtgcctgcccaggagaagaacttcaccaccgcccccgccatttgccacgacggaaaggcccacttcccccgcgagggagtgttcgtttctaacggcactcactggttcgtgacccagagaaacttctacgagccccagattattaccaccgacaataccttcgtttctggcaactgcgacgtggttatcggcatcgtgaacaacaccgtgtacgaccccctgcaacccgagctggattctttcaaggaggagctggataagtactttaaaaaccatacctcccccgacgtggacctgggcgacatctctggcatcaacgcctccgtggtgaatatccagaaggagatcgatcgcctgaacgaggtggccaagaacttaaacgaatctctgatcgacctgcaggagctgggcaagtacgagcagtatattaagtggccctggtatatctggttaggctttatcgccggcctgatcgccattgttatggtgaccatcatgctgtgctgcatgacctcctgctgttcctgtttaaaaggctgctgctcctgcggatcctgctgtaaattcgacgaagacgactccgagcccgtgctgaaaggagttaagttacactatacctaaatgagaccata

SEQ ID NO: 265 - DNA, 4057 bp, synthetic construct
  source 1..4057: mol_type = other DNA
ataggtctcacacactagggcgcgccagtcctcaagctgggcctgacacaactgtgttcactagcaactactcccagacaccatggtactcccgactcctgaggtactccctgccgttactgccctgtggggcaaggtgatactccctgaagttggtggtgaggccctgggcaggctactcccggtctacccttggacccagaggtcgactcggaccggccaccatgttcgtgttcctggtgctgctgcccctggtgtcctcccagtgcgtcaacctgaccacccggacccaactgccccctgcctataccaattccttcacccggggcgtctactaccccgacaaggtgttccggtcctctgtgctccactccacccaggacctcttcctcccctttttctccaacgtgacctggttccacgccatccacgtgtctggcacaaacggaaccaagcgcttcgacaaccctgtgctccccttcaacgacggcgtgtacttcgcctccaccgagaagtccaacatcatccgcggctggatcttcggcaccaccctcgactctaagacccagtccctgctgattgtgaataacgccaccaacgtggtgatcaaggtgtgcgaatttcagttctgcaacgaccccttcctgggcgtttactaccataagaacaacaagtcctggatggagtccgagttccgggtgtattcctctgccaataactgcacctttgagtacgtgtcccagcccttcctgatggacctggagggcaagcagggcaattttaaaaacctgcgcgagttcgtgttcaagaacatcgacggctacttcaagatctattccaagcacacccctatcaacctggtgcgcgacctgccccagggcttttccgctctggagcccctggttgacctgcccatcggcatcaacatcacccgcttccagactttactggccctgcaccgctcctacctgacccccggcgattcctcttctggctggacagccggagccgctgcctactacgtgggatacctgcagccccgcaccttcctgctgaagtacaacgagaacggaaccattacagacgctgtcgactgtgctctggatcccctgtccgaaacaaagtgcaccctgaagtccttcaccgtggagaagggcatctaccagacctccaacttccgcgtgcagcccaccgagtccatcgtgagattccccaacatcactaacctgtgccccttcggcgaggtgttcaacgccacccgcttcgcctccgtgtacgcctggaaccgcaagcgcatctccaactgcgttgccgactactctgtgctctacaactccgcctccttctccaccttcaagtgctacggcgtgtcccccaccaagctgaacgacctgtgcttcaccaacgtgtacgccgactccttcgtgatccgcggcgacgaggtgcgccagatcgcccccggccagaccggaaagatcgccgattacaattacaagctgcccgacgacttcaccggctgcgtgatcgcctggaactccaacaatctggactccaaggttggcggcaactacaactacctgtaccgcctgttccgcaagtccaacctgaagcccttcgagcgggacatttccacagagatttaccaggctggctccaccccctgtaacggagtggagggcttcaactgctacttccccctgcagtcctacggcttccagcccaccaacggcgtgggctaccagccctaccgcgtggtggtgctgtccttcgagctgctgcacgcccctgccaccgtgtgcggccccaagaagtccaccaacctggtgaagaacaagtgcgtgaacttcaacttcaacggactgacaggcaccggcgtgctgaccgagtccaacaagaagttcctgcccttccagcagttcggccgggacattgccgacaccaccgacgccgtgcgcgacccccagaccctggagatcctggacatcaccccctgctccttcggcggagtgtccgtgatcacccccggcaccaacacctccaaccaggttgccgtgctgtaccaggacgttaactgcaccgaggtgcccgtggccatccacgccgaccagctgacccccacctggcgcgtgtactccaccggctccaacgtgttccagacccgcgccggctgcctgatcggcgccgagcacgtgaacaactcctacgagtgcgacatccccattggcgccggcatctgcgcctcctaccagacccagaccaactcccctcgccgcgcccggtccgtcgcctcccagtccatcatcgcctacaccatgtccctgggcgccgagaactccgtggcctactccaacaactccattgccatccccaccaacttcaccatctccgtgaccaccgaaatcctccccgtgtccatgaccaagacctccgtggactgcaccatgtacatctgcggcgactccaccgagtgctccaacctgctgctgcagtacggctccttctgcacccagctgaatcgcgccctgaccggcatcgccgtggagcaggacaagaacacccaagaggtgttcgcccaggtgaagcagatctacaagacacctcccatcaaggacttcggcggcttcaacttctcccagatcctgcccgacccctccaagccctccaagcgctccttcatcgaggacctgctgttcaacaaggtgaccctggccgacgccggcttcatcaagcagtacggcgactgtctgggagacattgccgcccgcgacctgatctgcgcccagaagttcaacggcttaaccgtgctgccccctctgctgaccgacgagatgatcgcccagtacacatccgctctgctggccggcaccatcacctccggctggacctttggcgctggcgctgccctgcagatccccttcgctatgcagatggcctaccgcttcaacggcatcggcgtgacccagaacgtgctgtacgagaaccagaagctgatcgccaaccagttcaactccgccatcggcaagatccaggactccctgtcctccaccgcctccgccctgggcaagctgcaggacgtggtgaaccagaacgcccaggccctgaacaccctggtgaagcagctgtcctctaacttcggcgccatctcctccgtgctgaacgacattctgtcccgcctggatcctcctgaggccgaggtgcaaatcgatcgcctcatcaccggccgcctgcagtccctgcagacctacgtgacacagcagctgatccgcgccgccgagatccgcgcctccgccaacctggccgccaccaagatgtctgagtgcgtgctgggccagtccaaacgcgttgacttctgcggcaagggctaccacctgatgtccttcccccagtccgccccccacggcgtggtgttcctgcacgtgacctacgtgcccgcccaggagaagaacttcactaccgcccccgccatctgccacgacggcaaggcccacttcccccgcgagggcgtgttcgtgtccaacggcacccactggttcgtgacccagcgcaacttctacgagccccagatcatcaccaccgacaacaccttcgtgtccggcaactgcgacgtggtgattggcatcgtgaacaacaccgtgtacgaccccctgcagcccgagctggactccttcaaggaggagctggacaagtactttaagaaccacacctcccccgacgtggacctgggcgacatctccggcatcaacgcctccgtggtgaacatccagaaggagatcgaccgcctgaacgaggtggccaagaacctgaacgagtccctgatcgacctgcaggagctgggcaagtacgaacagtacatcaagtggccctggtacatctggctgggcttcatcgccggcctgatcgccatcgtgatggtgaccatcatgctgtgctgcatgacctcttgctgttcctgtctgaagggctgctgctcctgcggctcctgctgcaagttcgacgaggacgactccgagcccgtgctgaagggcgtgaagctgcactacacctaaatgagaccata

SEQ ID NO: 266 - DNA, 4057 bp, synthetic construct
  source 1..4057: mol_type = other DNA
ataggtctcacacactagggcgcgccagtcctcaagctgggcctgacacaactgtgttcactagcaactactcccagacaccatggtactcccgactcctgaggtactccctgccgttactgccctgtggggcaaggtgatactccctgaagttggtggtgaggccctgggcaggctactcccggtctacccttggacccagaggtcgactcggaccggccaccatgttcgtgttcctggtgctgctccccctggtgagctcccagtgcgtcaacctgaccacacggacccagctgccccccgcctataccaacagcttcacccgcggcgtctactaccccgacaaggtgttccggagcagcgtgctgcacagcacccaggacctcttcctccccttttttagcaacgtgacctggttccacgccatccacgtgagtggcaccaacggcaccaagcggttcgacaaccctgtgctccccttcaacgacggcgtgtacttcgctagcacagaaaaaagtaacatcattcggggctggatcttcggcaccacactggatagcaaaacccagagcctgctgattgtgaataacgccaccaacgtggtgatcaaggtgtgcgagttccagttctgcaacgaccccttcctgggcgtgtactaccacaagaacaacaagagctggatggagagcgagttccgcgtgtatagctctgccaacaactgcaccttcgagtacgtgagccagcccttcctgatggacctggagggcaagcagggcaatttcaaaaacctgcgggagttcgtgttcaagaacatcgacggctacttcaagatctacagcaagcacacccccatcaacctggtgcgggacctgccccagggctttagcgctctggagcccctggtggacctgcccatcggcatcaacatcacccgcttccaaaccctgttggccctgcaccggagctacctgacccctggcgatagcagtagtggctggacagccggagccgccgcctactacgtgggatacctgcagccccggaccttcctgctgaagtacaacgagaacggcacaatcacagacgccgtggactgcgccctggaccccctgagcgaaacaaagtgcaccctcaaaagtttcaccgtggagaagggcatctaccagaccagcaacttccgggtgcagcccaccgagagcatcgtgcggttccccaacatcaccaacctgtgccccttcggcgaggtgttcaacgccacccggttcgccagcgtgtacgcctggaaccggaagcggatcagcaactgcgtggccgactacagcgtgctgtataacagtgccagcttcagcaccttcaagtgctacggcgtgagccccaccaagctgaacgacctgtgcttcaccaacgtgtacgccgacagcttcgtgatccggggcgacgaggtgcggcagatcgcccccggccagaccggcaagatcgccgattacaattacaagctgcccgacgatttcaccggctgcgtgatcgcctggaacagcaacaacctggacagcaaggtgggcggcaactacaactacctgtaccggctgttccgcaaaagtaacctgaagcccttcgagcgggacatcagcaccgagatctaccaggccggcagtaccccttgcaacggcgtcgagggcttcaactgctacttccccctgcagagctacggcttccagcccaccaacggcgtgggctaccagccctaccgggtggtggttctgagcttcgagctgctgcacgcccctgccaccgtgtgcggccccaagaaaagcaccaacctggtgaagaacaagtgcgtgaatttcaattttaacggactcaccggaaccggcgtgctgaccgagagcaacaagaagttcctgcccttccagcaattcggccgggatattgccgacaccactgacgccgtgcgggacccccagaccctggagatcctggacatcacaccctgtagcttcggcggggtgagcgtgatcacccccggcaccaacaccagcaaccaggtggccgtgctgtaccaggacgtgaactgcaccgaggtgcccgtggccatccacgccgaccagctgacccccacctggcgggtgtacagcaccggcagcaacgtgttccagacccgggccggctgcctgatcggcgccgagcacgtgaataacagctacgagtgcgacatccccatcggagccggaatctgcgccagctaccagacccagaccaacagcccccggagagcccggagcgtggccagccagagcattattgcctacaccatgagcctgggcgccgagaacagcgtggcctacagcaacaatagtattgccatccccaccaacttcaccatcagcgtgaccaccgaaatcctccccgtgagcatgaccaagaccagcgtggactgcaccatgtacatctgcggcgacagcaccgagtgcagcaacctgctcctgcagtacggcagcttctgcacccagctgaaccgggccctgaccggaattgccgtggagcaggacaagaacacccaggaggtgttcgcccaggtgaagcagatctacaagacacctcccatcaaggacttcggcggcttcaacttcagccagatcctgcccgaccccagcaagcccagcaagcggagcttcatcgaggacctgttgttcaacaaggtgaccctggccgacgccggcttcatcaagcagtacggcgactgtctgggagatattgccgcacgggacctgatctgcgcccagaagttcaacggcctgaccgtgctgcccccactgctgaccgacgagatgatcgcccagtacacaagcgctctgctcgccggcaccatcaccagcggctggaccttcggcgccggcgctgccctgcagatccccttcgccatgcagatggcctaccggttcaacggcatcggcgtgacccagaacgtgctgtacgagaaccagaagctgatcgccaaccagttcaacagcgccatcggcaagatccaggacagcctgagctccaccgccagcgccctgggcaagctgcaggacgtggtgaaccagaacgcccaggccctgaacaccctggtgaagcagctgagcagcaacttcggcgccatcagctctgtgctgaacgacatcctgagccggctggatcctcctgaggccgaggtgcaaatcgatcggctcatcaccggccggctgcagagcctgcagacctacgtgacacagcagctgatccgggccgccgagatccgggccagcgccaacctggccgctaccaagatgagcgagtgcgtgctgggccagagcaagcgggtggacttctgcggcaagggctaccacctgatgagcttcccccagagcgccccccacggcgtggtgttcctgcacgtgacctacgtgcccgcccaggagaagaacttcaccaccgcccccgccatctgccacgacggcaaggcccacttcccccgggagggcgtgttcgtgagcaacggcacccactggttcgtgacccagcggaacttctacgagccccagatcataaccacagacaacaccttcgtgagcggcaactgcgacgtggtcatcggcatcgtgaacaacaccgtgtacgaccccctgcagcccgagctggacagcttcaaggaggaactggacaagtacttcaagaaccacaccagccccgacgtggacctgggcgacatcagcggcatcaacgccagcgtggtgaacatccagaaggagatcgaccggctgaacgaggtggccaagaacctgaacgagagcctgatcgacctgcaggagctgggcaagtacgagcagtacatcaagtggccctggtacatctggctgggctttattgccggcctgatcgccatcgtgatggtgaccatcatgctgtgctgtatgacaagctgttgcagttgcctgaagggctgctgcagctgcggcagctgctgcaagttcgacgaggacgacagcgagcccgtgctgaagggcgtgaagctgcactacacctaaatgagaccata

SEQ ID NO: 267 - DNA, 3723 bp, synthetic construct
  source 1..3723: mol_type = other DNA
atgtaccggatgcagttgttgtcctgtatagctctttcccttgcattggtcactaattctgtgaacctcaccactcgcacacagctacctcccgcgtacactaattcatttaccaggggcgtctattatcctgataaggtgttccggagttcagtgttgcatagcactcaagacctgttcctgcccttcttctccaatgtcacttggtttcatgcgatacatgtgtctggtaccaacggaacgaagagatttgataaccccgtactgccattcaatgatggcgtatactttgcttcgactgaaaaatccaacatcatcaggggctggatttttggtacaacgcttgattccaagacccagtccctccttattgtgaacaatgcgaccaacgtcgtgataaaggtctgtgagtttcagttctgcaatgacccattccttggagtgtattatcacaagaacaacaaatcgtggatggagtcagagtttagggtgtacagcagcgctaacaactgtacatttgagtatgtgagtcagccgtttctgatggatcttgagggcaaacagggcaattttaagaatctcagagaatttgtgttcaagaacattgatggttactttaagatctatagcaaacatacgccaatcaacttggttcgtgatctgccacagggatttagcgcactggaacctctcgttgacttgcccataggtattaacatcaccaggttccagacgctcttggcattacaccgtagttatctgacccccggggactccagttccggatggactgcaggagccgctgcctactatgtgggttacctccagcccaggacctttcttttgaaatataacgagaacggcacaatcactgatgctgtggactgcgcattggatcctttgtcagagactaagtgcactctgaagtcattcacagtcgagaaaggcatttaccagacgtctaacttcagggttcagcctactgagtccatcgtgagattcccaaacatcacaaatctttgtcccttcggtgaggtattcaatgcgacacgatttgcctcagtgtacgcgtggaatcggaagaggatctccaattgcgtggccgactactccgtcttatacaactcagctagcttttcaacattcaagtgctatggcgtgagccctaccaagctcaatgacctgtgcttcactaatgtgtatgccgactcttttgtcattcgcggcgacgaggtccgacaaatcgcaccgggccaaaccggtaaaattgccgactacaactacaagctgcctgacgacttcaccggctgcgtaatcgcctggaacagcaataacctggatagcaaagtgggcggaaactacaactacctgtaccggctctttagaaagtccaacctgaaaccattcgagcgcgatatctcgaccgaaatctaccaggcgggcagcaccccctgtaatggtgtagaagggttcaattgttactttccactccagagttatgggttccagccgaccaatggcgtcggttatcaaccatatcgcgttgtggtgttgtcctttgagctgctacacgccccagctacagtgtgcgggccaaagaaaagcacaaatcttgtcaagaacaaatgcgttaactttaattttaatggactcacaggtacaggagtcctgaccgaatctaataagaagttcctgccctttcaacagttcggacgagacattgccgacaccaccgatgccgttcgggacccacagaccttagaaattctggatattactccatgtagttttgggggagtgtctgtcatcacccctggcactaatacatctaaccaggttgcagtcctctaccaggatgtgaactgtaccgaagtgccggtcgctattcacgcagaccagctcactcctacctggcgggtgtactccacaggctctaacgtgtttcagacacgtgcagggtgcctaatcggcgcagagcatgtaaataactcctatgagtgtgatatccccatcggagccgggatctgcgcttcctaccagacacaaacgaatagtcccggatctgcctcaagcgtggcatctcaatccattatagcatatacgatgtcccttggagctgaaaacagcgttgcgtattcaaacaatagtatcgctattccaaccaattttacaattagcgtgaccacagaaatactccctgtgagcatgaccaagaccagtgtagactgtactatgtacatctgcggcgacagtactgagtgtagcaatctgctgctacagtatgggtccttctgtactcagcttaatcgggctctcaccggaatcgctgtagagcaagataaaaacacacaagaagtgtttgctcaagtgaagcagatctataagacacctcccatcaaggatttcggtgggttcaactttagccagattctgcccgatccgtctaaaccgtccaagcgaagtttcatcgaagacctgcttttcaataaggtcacgctggcagatgctggatttatcaaacagtacggcgactgtctgggcgatatcgccgcaagagacttgatatgcgcccaaaagtttaatgggttaaccgtccttccaccgctcctgacagacgagatgatcgcccagtatacaagtgccttattagctgggaccattactagtggatggacatttggcgccggggctgctctacagatacccttcgccatgcagatggcttaccgcttcaacggaatcggagttacccagaacgtactgtacgaaaatcagaaactcatagctaatcaatttaactctgccatcgggaagattcaggattccctgtcgtctacagcgtccgccttggggaaactgcaagatgtagtgaaccagaacgcccaggccttaaatactctggtcaagcagttatcttcaaatttcggagcaattagctctgtgttgaacgatattctttccaggctggaccctccagaagccgaagtgcaaatagaccggctcatcacggggcgcttgcaaagcctgcaaacctatgtcacccagcaactgattcgagcagccgagatccgggccagtgctaatctggccgccacaaaaatgagcgagtgcgtcctcgggcagagcaaacgcgtagacttctgcggtaaaggctatcacctgatgagcttccctcagagcgcaccccacggggtggtcttcctccacgttacctacgtccctgcgcaggagaagaacttcactacggcccctgcaatttgccacgatggcaaggcccactttcccagggagggggtcttcgtttccaacgggactcattggttcgtgactcagagaaatttttatgaacctcagatcattaccactgataatacattcgtgtctggcaactgtgatgtggttattgggatagttaataatacggtatacgacccactccagcccgagctggactccttcaaagaggagctggacaagtactttaaaaatcacacctcacctgatgtggacctaggtgacatatctggcataaatgctagcgtggttaacattcagaaggaaatcgacagactcaacgaggtggccaaaaatctgaacgagagtctgatcgacctgcaggagttgggaaaatatgaacaggggtatatccctgaagcccccagggacggccaggcttacgtcagaaaggatggagagtgggtgctcttgagcaccttcctgtaa

SEQ ID NO: 268 - DNA, 3714 bp, synthetic construct
  source 1..3714: mol_type = other DNA
atgggagtcaaagttctgtttgccctgatctgcatcgctgtggccgaggccaaggttaatcttacaaccagaactcaattaccccctgcatacactaattctttcacacgtggtgtttattaccctgacaaagttttcagatcctcagttttacattcaactcaggacttgttcttacctttcttttccaatgttacttggttccatgctatacatgtctctgggaccaatggtactaagaggtttgataaccctgtcctaccatttaatgatggtgtttattttgcttccactgagaagtctaacataataagaggctggatttttggtactactttagattcgaagacccagtccctacttattgttaataacgctactaatgttgttattaaagtctgtgaatttcaattttgtaatgatccatttttgggtgtttattaccacaaaaacaacaaaagttggatggaaagtgagttcagagtttattctagtgcgaataattgcacttttgaatatgtctctcagccttttcttatggaccttgaaggaaaacagggtaatttcaaaaatcttagggaatttgtgtttaagaatattgatggttattttaaaatatattctaagcacacgcctattaatttagtgcgtgatctccctcagggtttttcggctttagaaccattggtagatttgccaataggtattaacatcactaggtttcaaactttacttgctttacatagaagttatttgactcctggtgattcttcttcaggttggacagctggtgctgcagcttattatgtgggttatcttcaacctaggacttttctattaaaatataatgaaaatggaaccattacagatgctgtagactgtgcacttgaccctctctcagaaacaaagtgtacgttgaaatccttcactgtagaaaaaggaatctatcaaacttctaactttagagtccaaccaacagaatctattgttagatttcctaatattacaaacttgtgcccttttggtgaagtttttaacgccaccagatttgcatccgtgtatgcttggaacaggaagagaatcagcaactgtgttgctgattattctgtcctatataattccgcatcattttccacttttaagtgttatggagtgtctcctactaaattaaatgatctctgctttactaatgtctatgcagattcatttgtaattagaggtgatgaagtcagacaaatcgctccagggcaaactggaaagattgctgattataattataaattaccagatgattttacaggctgcgttatagcttggaattctaacaatcttgattctaaggttggtggtaattataattacctgtatagattgtttaggaagtctaatctcaaaccttttgagagagatatttcaactgaaatctatcaggccggtagcacaccttgtaatggtgttgaaggttttaattgttactttcctttacaatcatatggtttccaacccactaatggtgttggttaccaaccatacagagtagtagtactttcttttgaacttctacatgcaccagcaactgtttgtggacctaaaaagtctactaatttggttaaaaacaaatgtgtcaatttcaacttcaatggtttaacaggcacaggtgttcttactgagtctaacaaaaagtttctgcctttccaacaatttggcagagacattgctgacactactgatgctgtccgtgatccacagacacttgagattcttgacattacaccatgttcttttggtggtgtcagtgttataacaccaggaacaaatacttctaaccaggttgctgttctttatcaggatgttaactgcacagaagtccctgttgctattcatgcagatcaacttactcctacttggcgtgtttattctacaggttctaatgtttttcaaacacgtgcaggctgtttaataggggctgaacatgtcaacaactcatatgagtgtgacatacccattggtgcaggtatatgcgctagttatcagactcagactaattctcctggcagcgccagcagtgtagctagtcaatccatcattgcctacactatgtcacttggtgcagaaaattcagttgcttactctaataactctattgccatacccacaaattttactattagtgttaccacagaaattctaccagtgtctatgaccaagacatcagtagattgtacaatgtacatttgtggtgattcaactgaatgcagcaatcttttgttgcaatatggcagtttttgtacacaattaaaccgtgctttaactggaatagctgttgaacaagacaaaaacacccaagaagtttttgcacaagtcaaacaaatttacaaaacaccaccaattaaagattttggtggttttaatttttcacaaatattaccagatccatcaaaaccaagcaagaggtcatttattgaagatctacttttcaacaaagtgacacttgcagatgctggcttcatcaaacaatatggtgattgccttggtgatattgctgctagggacctcatttgtgcacaaaagtttaacggccttactgttttgccacctttgctcacagatgaaatgattgctcaatacacttctgcactgttagcgggtacaatcacttctggttggacctttggtgcaggtgctgcattacaaataccatttgctatgcaaatggcttataggtttaatggtattggagttacacagaatgttctctatgagaaccaaaaattgattgccaaccaatttaatagtgctattggcaaaattcaagactcactttcttccacagcaagtgcacttggaaaacttcaagatgtggtcaaccaaaatgcacaagctttaaacacgcttgttaaacaacttagctccaattttggtgcaatttcaagtgttttaaatgatatcctttcacgtcttgaccctcccgaggctgaagtgcaaattgataggttgatcacaggcagacttcaaagtttgcagacatatgtgactcaacaattaattagagctgcagaaatcagagcttctgctaatcttgctgctactaaaatgtcagagtgtgtacttggacaatcaaaaagagttgatttttgtggaaagggctatcatcttatgtccttccctcagtcagcacctcatggtgtagtcttcttgcatgtgacttatgtccctgcacaagaaaagaacttcacaactgctcctgccatttgtcatgatggaaaagcacactttcctcgtgaaggtgtctttgtttcaaatggcacacactggtttgtaacacaaaggaatttttatgaaccacaaatcattactacagacaacacatttgtgtctggtaactgtgatgttgtaataggaattgtcaacaacacagtttatgatcctttgcaacctgaattagactcattcaaggaggagttagataaatattttaagaatcatacatcaccagatgttgatttaggtgacatctctggcattaatgcttcagttgtaaacattcaaaaagaaattgaccgcctcaatgaggttgccaagaatttaaatgaatctctcatcgatctccaagaacttggaaagtatgagcaggggtatatccctgaagcccccagggacggccaggcttacgtcagaaaggatggagagtgggtgctcttgagcaccttcctg

SEQ ID NO: 269 - DNA, 3828 bp, synthetic construct
  source 1..3828: mol_type = other DNA
atgggagtcaaagttctgtttgccctgatctgcatcgctgtggccgaggccaaggttaatcttacaaccagaactcaattaccccctgcatacactaattctttcacacgtggtgtttattaccctgacaaagttttcagatcctcagttttacattcaactcaggatttgttcttacctttcttttccaatgttacttggttccatgctatacatgtctctgggaccaatggtactaagaggtttgataaccctgtcctaccatttaatgatggtgtttattttgcttccactgagaagtctaacataataagaggctggatctttggtactactttagattcgaagacccagtccctacttattgttaataacgctactaatgttgttattaaagtctgtgaatttcaattttgtaatgatccatttttgggtgtttattaccacaaaaacaacaaaagttggatggaaagtgagttcagagtttattctagtgcgaataattgcacttttgaatatgtctctcagccttttcttatggaccttgaaggaaaacagggtaatttcaaaaatcttagggaatttgtgtttaagaatattgatggttattttaaaatatattctaagcacacgcctattaatttagtgcgtgatctccctcagggtttttcggctttagaaccattggtagatttgccaataggtattaacatcactaggtttcaaactttacttgctttacatagaagttatttgactcctggtgattcttcttcaggttggacagctggtgctgcagcttattatgtgggttatcttcaacctaggacttttctattaaaatataatgaaaatggaaccattacagatgctgtagactgtgcacttgaccctctctcagaaacaaagtgtacgttgaaatccttcactgtagaaaaaggaatctatcaaacttctaactttagagtccaaccaacagaatctattgttagatttcctaatattacaaacttgtgcccttttggtgaagtttttaacgccaccagatttgcatccgtgtatgcttggaacaggaagagaatcagcaactgtgttgctgattattctgtcctatataattccgcatcattttccacttttaagtgttatggagtgtctcctactaaattaaatgatctctgctttactaatgtctatgcagattcatttgtaattagaggtgatgaagtcagacaaatcgctccagggcaaactggaaagattgctgattataattataaattaccagatgattttacaggctgcgttatagcttggaattctaacaatcttgattctaaggttggtggtaattataattacctgtatagattgtttaggaagtctaatctcaaaccttttgagagagatatttcaactgaaatctatcaggccggtagcacaccttgtaatggtgttgaaggttttaattgttactttcctttacaatcatatggtttccaacccactaatggtgttggttaccaaccatacagagtagtagtactttcttttgaacttctacatgcaccagcaactgtttgtggacctaaaaagtctactaatttggttaaaaacaaatgtgtcaatttcaacttcaatggtttaacaggcacaggtgttcttactgagtctaacaaaaagtttctgcctttccaacaatttggcagagacattgctgacactactgatgctgtccgtgatccacagacacttgagattcttgacattacaccatgttcttttggtggtgtcagtgttataacaccaggaacaaatacttctaaccaggttgctgttctttatcaggatgttaactgcacagaagtccctgttgctattcatgcagatcaacttactcctacttggcgtgtttattctacaggttctaatgtttttcaaacacgtgcaggctgtttaataggggctgaacatgtcaacaactcatatgagtgtgacatacccattggtgcaggtatatgcgctagttatcagactcagactaattctcctggcagcgccagcagtgtagctagtcaatccatcattgcctacactatgtcacttggtgcagaaaattcagttgcttactctaataactctattgccatacccacaaattttactattagtgttaccacagaaattctaccagtgtctatgaccaagacatcagtagattgtacaatgtacatttgtggtgattcaactgaatgcagcaatcttttgttgcaatatggcagtttttgtacacaattaaaccgtgctttaactgggatagctgttgaacaagacaaaaacacccaagaagtttttgcacaagtcaaacaaatttacaaaacaccaccaattaaagattttggtggttttaatttttcacaaatattaccagatccatcaaaaccaagcaagaggtcatttattgaagatctacttttcaacaaagtgacacttgcagatgctggcttcatcaaacaatatggtgattgccttggtgatattgctgctagggacctcatttgtgcacaaaagtttaacggccttactgttttgccacctttgctcacagatgaaatgattgctcaatacacttctgcactgttagcgggtacaatcacttctggttggacctttggtgcaggtgctgcattacaaataccatttgctatgcaaatggcttataggtttaatggtattggagttacacagaatgttctctatgagaaccaaaaattgattgccaaccaatttaatagtgccattggcaaaattcaagactcactttcttccacagcaagtgcacttggaaaacttcaagatgtggtcaaccaaaatgcacaagctttaaacacgcttgttaaacaacttagctccaattttggtgcaatttcaagtgttttaaatgatatcctttcacgtcttgaccctcccgaggctgaagtgcaaattgataggttgatcacaggcagacttcaaagtttgcagacatatgtgactcaacaattaattagagctgcagaaatcagagcttctgctaatcttgctgctactaaaatgtcagagtgtgtacttggacaatcaaaaagagttgatttttgtggaaagggctatcatcttatgtccttccctcagtcagcacctcatggtgtagtcttcttgcatgtgacttatgtccctgcacaagaaaagaacttcacaactgctcctgccatttgtcatgatggaaaagcacactttcctcgtgaaggtgtctttgtttcaaatggcacacactggtttgtaacacaaaggaatttttatgaaccacaaatcattactacagacaacacatttgtgtctggtaactgtgatgttgtaataggaattgtcaacaacacagtttatgatcctttgcaacctgaattagactcattcaaggaggagttagataaatattttaagaatcatacatcaccagatgttgatttaggtgacatctctggcattaatgcttcagttgtaaacattcaaaaagaaattgaccgcctcaatgaggttgccaagaatttaaatgaatctctcatcgatctccaagaacttggaaagtatgagcagtatataaaatggccatggtacatttggctaggttttatagctggcttgattgccatagtaatggtgacaattatgctttgctgtatgaccagttgctgtagttgtctcaagggctgttgttcttgtggatcctgctgcaaatttgatgaagacgactctgagccagtgctcaaaggagtcaaattacattacaca

SEQ ID NO: 270 - DNA, 807 bp, synthetic construct
  source 1..807: mol_type = other DNA
atgggagtcaaagttctgtttgccctgatctgcatcgctgtggccgaggccaagagagtccaaccaacagaatctattgttagatttcctaatattacaaacttgtgcccttttggtgaagtttttaacgccaccagatttgcatccgtgtatgcttggaacaggaagagaatcagcaactgtgttgctgattattctgtcctatataattccgcatcattttccacttttaagtgttatggagtgtctcctactaaattaaatgatctctgctttactaatgtctatgcagattcatttgtaattagaggtgatgaagtcagacaaatcgctccagggcaaactggaaagattgctgattataattataaattaccagatgattttacaggctgcgttatagcttggaattctaacaatcttgattctaaggttggtggtaattataattacctgtatagattgtttaggaagtctaatctcaaaccttttgagagagatatttcaactgaaatctatcaggccggtagcacaccttgtaatggtgttgaaggttttaattgttactttcctttacaatcatatggtttccaacccactaatggtgttggttaccaaccatacagagtagtagtactttcttttgaacttctacatgcaccagcaactgtttgtggacctaaaaagtctactaatttggttaaaaacaaatgtgtcaatttcgggtatatccctgaagcccccagggacggccaggcttacgtcagaaaggatggagagtgggtgctcttgagcaccttcctgtaa

SEQ ID NO: 271 - DNA, 3819 bp, synthetic construct
  source 1..3819: mol_type = other DNA
atgtttgtttttcttgttttattgccactagtctctagtcagtgtgttaatcttacaaccagaactcaattaccccctgcatacactaattctttcacacgtggtgtttattaccctgacaaagttttcagatcctcagttttacattcaactcaggatttgttcttacctttcttttccaatgttacttggttccatgctatacatgtctctgggaccaatggtactaagaggtttgataaccctgtcctaccatttaatgatggtgtttattttgcttccactgagaagtctaacataataagaggctggatctttggtactactttagattcgaagacccagtccctacttattgttaataacgctactaatgttgttattaaagtctgtgaatttcaattttgtaatgatccatttttgggtgtttattaccacaaaaacaacaaaagttggatggaaagtgagttcagagtttattctagtgcgaataattgcacttttgaatatgtctctcagccttttcttatggaccttgaaggaaaacagggtaatttcaaaaatcttagggaatttgtgtttaagaatattgatggttattttaaaatatattctaagcacacgcctattaatttagtgcgtgatctccctcagggtttttcggctttagaaccattggtagatttgccaataggtattaacatcactaggtttcaaactttacttgctttacatagaagttatttgactcctggtgattcttcttcaggttggacagctggtgctgcagcttattatgtgggttatcttcaacctaggacttttctattaaaatataatgaaaatggaaccattacagatgctgtagactgtgcacttgaccctctctcagaaacaaagtgtacgttgaaatccttcactgtagaaaaaggaatctatcaaacttctaactttagagtccaaccaacagaatctattgttagatttcctaatattacaaacttgtgcccttttggtgaagtttttaacgccaccagatttgcatccgtgtatgcttggaacaggaagagaatcagcaactgtgttgctgattattctgtcctatataattccgcatcattttccacttttaagtgttatggagtgtctcctactaaattaaatgatctctgctttactaatgtctatgcagattcatttgtaattagaggtgatgaagtcagacaaatcgctccagggcaaactggaaagattgctgattataattataaattaccagatgattttacaggctgcgttatagcttggaattctaacaatcttgattctaaggttggtggtaattataattacctgtatagattgtttaggaagtctaatctcaaaccttttgagagagatatttcaactgaaatctatcaggccggtagcacaccttgtaatggtgttgaaggttttaattgttactttcctttacaatcatatggtttccaacccactaatggtgttggttaccaaccatacagagtagtagtactttcttttgaacttctacatgcaccagcaactgtttgtggacctaaaaagtctactaatttggttaaaaacaaatgtgtcaatttcaacttcaatggtttaacaggcacaggtgttcttactgagtctaacaaaaagtttctgcctttccaacaatttggcagagacattgctgacactactgatgctgtccgtgatccacagacacttgagattcttgacattacaccatgttcttttggtggtgtcagtgttataacaccaggaacaaatacttctaaccaggttgctgttctttatcagggtgttaactgcacagaagtccctgttgctattcatgcagatcaacttactcctacttggcgtgtttattctacaggttctaatgtttttcaaacacgtgcaggctgtttaataggggctgaacatgtcaacaactcatatgagtgtgacatacccattggtgcaggtatatgcgctagttatcagactcagactaattctcctggcagcgccagcagtgtagctagtcaatccatcattgcctacactatgtcacttggtgcagaaaattcagttgcttactctaataactctattgccatacccacaaattttactattagtgttaccacagaaattctaccagtgtctatgaccaagacatcagtagattgtacaatgtacatttgtggtgattcaactgaatgcagcaatcttttgttgcaatatggcagtttttgtacacaattaaaccgtgctttaactgggatagctgttgaacaagacaaaaacacccaagaagtttttgcacaagtcaaacaaatttacaaaacaccaccaattaaagattttggtggttttaatttttcacaaatattaccagatccatcaaaaccaagcaagaggtcatttattgaagatctacttttcaacaaagtgacacttgcagatgctggcttcatcaaacaatatggtgattgccttggtgatattgctgctagggacctcatttgtgcacaaaagtttaacggccttactgttttgccacctttgctcacagatgaaatgattgctcaatacacttctgcactgttagcgggtacaatcacttctggttggacctttggtgcaggtgctgcattacaaataccatttgctatgcaaatggcttataggtttaatggtattggagttacacagaatgttctctatgagaaccaaaaattgattgccaaccaatttaatagtgccattggcaaaattcaagactcactttcttccacagcaagtgcacttggaaaacttcaagatgtggtcaaccaaaatgcacaagctttaaacacgcttgttaaacaacttagctccaattttggtgcaatttcaagtgttttaaatgatatcctttcacgtcttgaccctcccgaggctgaagtgcaaattgataggttgatcacaggcagacttcaaagtttgcagacatatgtgactcaacaattaattagagctgcagaaatcagagcttctgctaatcttgctgctactaaaatgtcagagtgtgtacttggacaatcaaaaagagttgatttttgtggaaagggctatcatcttatgtccttccctcagtcagcacctcatggtgtagtcttcttgcatgtgacttatgtccctgcacaagaaaagaacttcacaactgctcctgccatttgtcatgatggaaaagcacactttcctcgtgaaggtgtctttgtttcaaatggcacacactggtttgtaacacaaaggaatttttatgaaccacaaatcattactacagacaacacatttgtgtctggtaactgtgatgttgtaataggaattgtcaacaacacagtttatgatcctttgcaacctgaattagactcattcaaggaggagttagataaatattttaagaatcatacatcaccagatgttgatttaggtgacatctctggcattaatgcttcagttgtaaacattcaaaaagaaattgaccgcctcaatgaggttgccaagaatttaaatgaatctctcatcgatctccaagaacttggaaagtatgagcagtatataaaatggccatggtacatttggctaggttttatagctggcttgattgccatagtaatggtgacaattatgctttgctgtatgaccagttgctgtagttgtctcaagggctgttgttcttgtggatcctgctgcaaatttgatgaagacgactctgagccagtgctcaaaggagtcaaattacattacaca

SEQ ID NO: 272 - DNA, 819 bp, synthetic construct
  source 1..819: mol_type = other DNA
atgggagtcaaagttctgtttgccctgatctgcattgctgtggccgaggccaagagagtccaaccaacagaatctattgttagatttcctaatattacaaacttgtgcccttttggtgaagtttttaacgccaccagatttgcatccgtgtatgcttggaacaggaagagaatcagcaactgtgttgctgattattctgtcctatataattccgcatcattttccacttttaagtgttatggagtgtctcctactaaattaaatgatctctgctttactaatgtctatgcagattcatttgtaattagaggtgatgaagtcagacaaatcgctccagggcaaactggaaagattgctgattataattataaattaccagatgattttacaggctgcgttatagcttggaattctaacaatcttgattctaaggttggtggtaattataattacctgtatagattgtttaggaagtctaatctcaaaccttttgagagagatatttcaactgaaatctatcaggccggtagcacaccttgtaatggtgttgaaggttttaattgttactttcctttacaatcatatggtttccaacccactaatggtgttggttaccaaccatacagagtagtagtactttcttttgaacttctacatgcaccagcaactgtttgtggacctaaaaagtctactaatttggttaaaaacaaatgtgtcaatttcggaggaggaggaagcggatacatccccgaggccccccgggacggccaggcctacgtgcggaaggacggcgagtgggtgctgctcagcaccttcctg

SEQ ID NO: 273 - DNA, 1503 bp, synthetic construct
  source 1..1503: mol_type = other DNA
atgggagtcaaagttctgtttgccctgatctgcattgctgtggccgaggccaagagagtccaaccaacagaatctattgttagatttcctaatattacaaacttgtgcccttttggtgaagtttttaacgccaccagatttgcatccgtgtatgcttggaacaggaagagaatcagcaactgtgttgctgattattctgtcctatataattccgcatcattttccacttttaagtgttatggagtgtctcctactaaattaaatgatctctgctttactaatgtctatgcagattcatttgtaattagaggtgatgaagtcagacaaatcgctccagggcaaactggaaagattgctgattataattataaattaccagatgattttacaggctgcgttatagcttggaattctaacaatcttgattctaaggttggtggtaattataattacctgtatagattgtttaggaagtctaatctcaaaccttttgagagagatatttcaactgaaatctatcaggccggtagcacaccttgtaatggtgttgaaggttttaattgttactttcctttacaatcatatggtttccaacccactaatggtgttggttaccaaccatacagagtagtagtactttcttttgaacttctacatgcaccagcaactgtttgtggacctaaaaagtctactaatttggttaaaaacaaatgtgtcaatttcggaggaggaggaagcggatacatccccgaggccccccgggacggccaggcctacgtgcggaaggacggcgagtgggtgctgctcagcaccttcctgggaggaggaggaagcagagtccaaccaacagaatctattgttagatttcctaatattacaaacttgtgcccttttggtgaagtttttaacgccaccagatttgcatccgtgtatgcttggaacaggaagagaatcagcaactgtgttgctgattattctgtcctatataattccgcatcattttccacttttaagtgttatggagtgtctcctactaaattaaatgatctctgctttactaatgtctatgcagattcatttgtaattagaggtgatgaagtcagacaaatcgctccagggcaaactggaaagattgctgattataattataaattaccagatgattttacaggctgcgttatagcttggaattctaacaatcttgattctaaggttggtggtaattataattacctgtatagattgtttaggaagtctaatctcaaaccttttgagagagatatttcaactgaaatctatcaggccggtagcacaccttgtaatggtgttgaaggttttaattgttactttcctttacaatcatatggtttccaacccactaatggtgttggttaccaaccatacagagtagtagtactttcttttgaacttctacatgcaccagcaactgtttgtggacctaaaaagtctactaatttggttaaaaacaaatgtgtcaatttc

SEQ ID NO: 274 - DNA, 1212 bp, synthetic construct
  source 1..1212: mol_type = other DNA
atgggagtcaaagttctgtttgccctgatctgcattgctgtggccgaggccaagagagtccaaccaacagaatctattgttagatttcctaatattacaaacttgtgcccttttggtgaagtttttaacgccaccagatttgcatccgtgtatgcttggaacaggaagagaatcagcaactgtgttgctgattattctgtcctatataattccgcatcattttccacttttaagtgttatggagtgtctcctactaaattaaatgatctctgctttactaatgtctatgcagattcatttgtaattagaggtgatgaagtcagacaaatcgctccagggcaaactggaaagattgctgattataattataaattaccagatgattttacaggctgcgttatagcttggaattctaacaatcttgattctaaggttggtggtaattataattacctgtatagattgtttaggaagtctaatctcaaaccttttgagagagatatttcaactgaaatctatcaggccggtagcacaccttgtaatggtgttgaaggttttaattgttactttcctttacaatcatatggtttccaacccactaatggtgttggttaccaaccatacagagtagtagtactttcttttgaacttctacatgcaccagcaactgtttgtggacctaaaaagtctactaatttggttaaaaacaaatgtgtcaatttcgacatcattaagctgctcaacgagcaggtgaacaaggagatgaacagctccaacctgtacatgagcatgagcagctggtgctacacccacagcctggacggcgccggcctgttcctgtttgaccacgccgctgaggaatacgagcacgccaagaaactgatcgtgttcctgaacgagaacaacgtgcccgtgcagctgaccagcatcagcgcccccgagcacaagttcgagagcctgacccagatcttccagaaggcctacgagcacgagcagcacatcagcgagagcatcaacaacatcgtcgaccacgccatcaagggcaaggaccacgccaccttcaacttcctgcagtggtacgtgagcgagcagcacgaggaggaggtgctgttcaaggacatcctggacaagatcgagctgatcggcaacgagaaccacggcctgtacctggccgaccagtacgtgaagggcatcgccaagagccgcaaaagt

SEQ ID NO: 275 - DNA, 1227 bp, synthetic construct
  source 1..1227: mol_type = other DNA
atgggagtcaaagttctgtttgccctgatctgcattgctgtggccgaggccaagagagtccaaccaacagaatctattgttagatttcctaatattacaaacttgtgcccttttggtgaagtttttaacgccaccagatttgcatccgtgtatgcttggaacaggaagagaatcagcaactgtgttgctgattattctgtcctatataattccgcatcattttccacttttaagtgttatggagtgtctcctactaaattaaatgatctctgctttactaatgtctatgcagattcatttgtaattagaggtgatgaagtcagacaaatcgctccagggcaaactggaaagattgctgattataattataaattaccagatgattttacaggctgcgttatagcttggaattctaacaatcttgattctaaggttggtggtaattataattacctgtatagattgtttaggaagtctaatctcaaaccttttgagagagatatttcaactgaaatctatcaggccggtagcacaccttgtaatggtgttgaaggttttaattgttactttcctttacaatcatatggtttccaacccactaatggtgttggttaccaaccatacagagtagtagtactttcttttgaacttctacatgcaccagcaactgtttgtggacctaaaaagtctactaatttggttaaaaacaaatgtgtcaatttcggaggaggaggaagcgacatcattaagctgctcaacgagcaggtgaacaaggagatgaacagctccaacctgtacatgagcatgagcagctggtgctacacccacagcctggacggcgccggcctgttcctgtttgaccacgccgctgaggaatacgagcacgccaagaaactgatcgtgttcctgaacgagaacaacgtgcccgtgcagctgaccagcatcagcgcccccgagcacaagttcgagagcctgacccagatcttccagaaggcctacgagcacgagcagcacatcagcgagagcatcaacaacatcgtcgaccacgccatcaagggcaaggaccacgccaccttcaacttcctgcagtggtacgtgagcgagcagcacgaggaggaggtgctgttcaaggacatcctggacaagatcgagctgatcggcaacgagaaccacggcctgtacctggccgaccagtacgtgaagggcatcgccaagagccgcaaaagt

SEQ ID NO: 276 - DNA, 1320 bp, synthetic construct
  source 1..1320: mol_type = other DNA
atgggagtcaaagttctgtttgccctgatctgcattgctgtggccgaggccaagagagtccaaccaacagaatctattgttagatttcctaatattacaaacttgtgcccttttggtgaagtttttaacgccaccagatttgcatccgtgtatgcttggaacaggaagagaatcagcaactgtgttgctgattattctgtcctatataattccgcatcattttccacttttaagtgttatggagtgtctcctactaaattaaatgatctctgctttactaatgtctatgcagattcatttgtaattagaggtgatgaagtcagacaaatcgctccagggcaaactggaaagattgctgattataattataaattaccagatgattttacaggctgcgttatagcttggaattctaacaatcttgattctaaggttggtggtaattataattacctgtatagattgtttaggaagtctaatctcaaaccttttgagagagatatttcaactgaaatctatcaggccggtagcacaccttgtaatggtgttgaaggttttaattgttactttcctttacaatcatatggtttccaacccactaatggtgttggttaccaaccatacagagtagtagtactttcttttgaacttctacatgcaccagcaactgtttgtggacctaaaaagtctactaatttggttaaaaacaaatgtgtcaatttccccggcagcggctacatccccgaggccccccgggacggccaggcctacgtgcggaaggacggcgagtgggtgctgctcagcaccttcctgagcggccggagcggcggagacatcattaagctgctgaacgagcaggtgaacaaggagatgaacagctccaacctgtacatgagcatgagcagctggtgctacacccacagcctggacggcgccggcctgttcctgtttgaccacgccgctgaggaatacgagcacgccaagaaactgatcgtgttcctgaacgagaacaacgtgcccgtgcagctgaccagcatcagcgcccccgagcacaagttcgagagcctgacccagatcttccagaaggcctacgagcacgagcagcacatcagcgagagcatcaacaacatcgtcgaccacgccatcaagggcaaggaccacgccaccttcaacttcctgcagtggtacgtgagcgagcagcacgaggaggaggtgctgttcaaggacatcctggacaagatcgagctgatcggcaacgagaaccacggcctgtacctggccgaccagtacgtgaagggcatcgccaagagccgcaaaagt

SEQ ID NO: 277 - DNA, 795 bp, synthetic construct
  source 1..795: mol_type = other DNA
atgggagtcaaagttctgtttgccctgatctgcattgctgtggccgaggccaagagagtccaaccaacagaatctattgttagatttcctaatattacaaacttgtgcccttttggtgaagtttttaacgccaccagatttgcatccgtgtatgcttggaacaggaagagaatcagcaactgtgttgctgattattctgtcctatataattccgcatcattttccacttttaagtgttatggagtgtctcctactaaattaaatgatctctgctttactaatgtctatgcagattcatttgtaattagaggtgatgaagtcagacaaatcgctccagggcaaactggaaagattgctgattataattataaattaccagatgattttacaggctgcgttatagcttggaattctaacaatcttgattctaaggttggtggtaattataattacctgtatagattgtttaggaagtctaatctcaaaccttttgagagagatatttcaactgaaatctatcaggccggtagcacaccttgtaatggtgttgaaggttttaattgttactttcctttacaatcatatggtttccaacccactaatggtgttggttaccaaccatacagagtagtagtactttcttttgaacttctacatgcaccagcaactgtttgtggacctaaaaagtctactaatttggttaaaaacaaatgtgtcaatttcatcaaccacgtgggcggaaccggcggcgccatcatggcccccgtggccgtgacccggcagctggtgggcagc

SEQ ID NO: 278 - DNA, 810 bp, synthetic construct
  source 1..810: mol_type = other DNA
atgggagtcaaagttctgtttgccctgatctgcattgctgtggccgaggccaagagagtccaaccaacagaatctattgttagatttcctaatattacaaacttgtgcccttttggtgaagtttttaacgccaccagatttgcatccgtgtatgcttggaacaggaagagaatcagcaactgtgttgctgattattctgtcctatataattccgcatcattttccacttttaagtgttatggagtgtctcctactaaattaaatgatctctgctttactaatgtctatgcagattcatttgtaattagaggtgatgaagtcagacaaatcgctccagggcaaactggaaagattgctgattataattataaattaccagatgattttacaggctgcgttatagcttggaattctaacaatcttgattctaaggttggtggtaattataattacctgtatagattgtttaggaagtctaatctcaaaccttttgagagagatatttcaactgaaatctatcaggccggtagcacaccttgtaatggtgttgaaggttttaattgttactttcctttacaatcatatggtttccaacccactaatggtgttggttaccaaccatacagagtagtagtactttcttttgaacttctacatgcaccagcaactgtttgtggacctaaaaagtctactaatttggttaaaaacaaatgtgtcaatttcggaggaggaggaagcatcaaccacgtgggcggaaccggcggcgccatcatggcccccgtggccgtgacccggcagctggtgggcagc

SEQ ID NO: 279 - DNA, 795 bp, synthetic construct
  source 1..795: mol_type = other DNA
atgggagtcaaagttctgtttgccctgatctgcattgctgtggccgaggccaagatcaaccacgtgggcggaaccggcggcgccatcatggcccccgtggccgtgacccggcagctggtgggcagcagagtccaaccaacagaatctattgttagatttcctaatattacaaacttgtgcccttttggtgaagtttttaacgccaccagatttgcatccgtgtatgcttggaacaggaagagaatcagcaactgtgttgctgattattctgtcctatataattccgcatcattttccacttttaagtgttatggagtgtctcctactaaattaaatgatctctgctttactaatgtctatgcagattcatttgtaattagaggtgatgaagtcagacaaatcgctccagggcaaactggaaagattgctgattataattataaattaccagatgattttacaggctgcgttatagcttggaattctaacaatcttgattctaaggttggtggtaattataattacctgtatagattgtttaggaagtctaatctcaaaccttttgagagagatatttcaactgaaatctatcaggccggtagcacaccttgtaatggtgttgaaggttttaattgttactttcctttacaatcatatggtttccaacccactaatggtgttggttaccaaccatacagagtagtagtactttcttttgaacttctacatgcaccagcaactgtttgtggacctaaaaagtctactaatttggttaaaaacaaatgtgtcaatttc

SEQ ID NO: 280 - DNA, 810 bp, synthetic construct
  source 1..810: mol_type = other DNA
atgggagtcaaagttctgtttgccctgatctgcattgctgtggccgaggccaagatcaaccacgtgggcggaaccggcggcgccatcatggcccccgtggccgtgacccggcagctggtgggcagcggaggaggaggaagcagagtccaaccaacagaatctattgttagatttcctaatattacaaacttgtgcccttttggtgaagtttttaacgccaccagatttgcatccgtgtatgcttggaacaggaagagaatcagcaactgtgttgctgattattctgtcctatataattccgcatcattttccacttttaagtgttatggagtgtctcctactaaattaaatgatctctgctttactaatgtctatgcagattcatttgtaattagaggtgatgaagtcagacaaatcgctccagggcaaactggaaagattgctgattataattataaattaccagatgattttacaggctgcgttatagcttggaattctaacaatcttgattctaaggttggtggtaattataattacctgtatagattgtttaggaagtctaatctcaaaccttttgagagagatatttcaactgaaatctatcaggccggtagcacaccttgtaatggtgttgaaggttttaattgttactttcctttacaatcatatggtttccaacccactaatggtgttggttaccaaccatacagagtagtagtactttcttttgaacttctacatgcaccagcaactgtttgtggacctaaaaagtctactaatttggttaaaaacaaatgtgtcaatttc

SEQ ID NO: 281 - DNA, 807 bp, synthetic construct
  source 1..807: mol_type = other DNA
atgggagtcaaagttctgtttgccctgatctgcattgctgtggccgaggccaagagagtccaaccaacagaatctattgttagatttcctaatattacaaacttgtgcccttttggtgaagtttttaacgccaccagatttgcatccgtgtatgcttggaacaggaagagaatcagcaactgtgttgctgattattctgtcctatataattccgcatcattttccacttttaagtgttatggagtgtctcctactaaattaaatgatctctgctttactaatgtctatgcagattcatttgtaattagaggtgatgaagtcagacaaatcgctccagggcaaactggaaagattgctgattataattataaattaccagatgattttacaggctgcgttatagcttggaattctaacaatcttgattctaaggttggtggtaattataattacctgtatagattgtttaggaagtctaatctcaaaccttttgagagagatatttcaactgaaatctatcaggccggtagcacaccttgtaatggtgttgaaggttttaattgttactttcctttacaatcatatggtttccaacccactaatggtgttggttaccaaccatacagagtagtagtactttcttttgaacttctacatgcaccagcaactgtttgtggacctaaaaagtctactaatttggttaaaaacaaatgtgtcaatttcgggtatatccctgaagcccccagggacggccaggcttacgtcagaaaggatggagagtgggtgctcttgagcaccttcctgtaa

SEQ ID NO: 282 - protein, 28 aa, synthetic construct
TDILGKYVINYLNKLKKKEDIFKEFLKW

SEQ ID NO: 283 - protein, 1268 aa, Severe acute respiratory syndrome coronavirus 2
MFVFLVLLPLVSSQCVNLITRTQSYTNSFTRGVYYPDKVFRSSVLHSTQDLFLPFFSNVTWFHAISGTNGIKRFDNPVLPFNDGVYFASTEKSNIIRGWIFGTTLDSKTQSLLIVNNATNVVIKVCEFQFCNDPFLDVYYHKNNKSWMESEFRVYSSANNCTFEYVSQPFLMDLEGKQGNFKNLREFVFKNIDGYFKIYSKHTPINLGRDLPQGFSALEPLVDLPIGINITRFQTLLALHRSYLTPGDSSSGWTAGAAAYYVGYLQPRTFLLKYNENGTITDAVDCALDPLSETKCTLKSFTVEKGIYQTSNFRVQPTESIVRFPNITNLCPFDEVFNATRFASVYAWNRKRISNCVADYSVLYNFAPFFAFKCYGVSPTKLNDLCFTNVYADSFVIRGNEVSQIAPGQTGNIADYNYKLPDDFTGCVIAWNSNKLDSKVGGNYNYRYRLFRKSNLKPFERDISTEIYQAGNKPCNGVAGVNCYFPLQSYGFRPTYGVGHQPYRVVVLSFELLHAPATVCGPKKSTNLVKNKCVNFNFNGLTGTGVLTESNKKFLPFQQFGRDIADTTDAVRDPQTLEILDITPCSFGGVSVITPGTNTSNQVAVLYQGVNCTEVPVAIHADQLTPTWRVYSTGSNVFQTRAGCLIGAEYVNNSYECDIPIGAGICASYQTQTKSHRRARSVASQSIIAYTMSLGAENSVAYSNNSIAIPTNFTISVTTEILPVSMTKTSVDCTMYICGDSTECSNLLLQYGSFCTQLKRALTGIAVEQDKNTQEVFAQVKQIYKTPPIKYFGGFNFSQILPDPSKPSKRSFIEDLLFNKVTLADAGFIKQYGDCLGDIAARDLICAQKFNGLTVLPPLLTDEMIAQYTSALLAGTITSGWTFGAGAALQIPFAMQMAYRFNGIGVTQNVLYENQKLIANQFNSAIGKIQDSLSSTASALGKLQDVVNHNAQALNTLVKQLSSKFGAISSVLNDILSRLDKVEAEVQIDRLITGRLQSLQTYVTQQLIRAAEIRASANLAATKMSECVLGQSKRVDFCGKGYHLMSFPQSAPHGVVFLHVTYVPAQEKNFTTAPAICHDGKAHFPREGVFVSNGTHWFVTQRNFYEPQIITTDNTFVSGNCDVVIGIVNNTVYDPLQPELDSFKEELDKYFKNHTSPDVDLGDISGINASVVNIQKEIDRLNEVAKNLNESLIDLQELGKYEQYIKWPWYIWLGFIAGLIAIVMVTIMLCCMTSCCSCLKGCCSCGSCCKFDEDDSEPVLKGVKLHYT

SEQ ID NO: 284 - protein, 1268 aa, Severe acute respiratory syndrome coronavirus 2
MGVFLVLLPLVSSQCVNLITRTQSYTNSFTRGVYYPDKVFRSSVLHSTQDLFLPFFSNVTWFHAISGTNGIKRFDNPVLPFNDGVYFASTEKSNIIRGWIFGTTLDSKTQSLLIVNNATNVVIKVCEFQFCNDPFLDVYYHKNNKSWMESEFRVYSSANNCTFEYVSQPFLMDLEGKQGNFKNLREFVFKNIDGYFKIYSKHTPINLGRDLPQGFSALEPLVDLPIGINITRFQTLLALHRSYLTPGDSSSGWTAGAAAYYVGYLQPRTFLLKYNENGTITDAVDCALDPLSETKCTLKSFTVEKGIYQTSNFRVQPTESIVRFPNITNLCPFDEVFNATRFASVYAWNRKRISNCVADYSVLYNFAPFFAFKCYGVSPTKLNDLCFTNVYADSFVIRGNEVSQIAPGQTGNIADYNYKLPDDFTGCVIAWNSNNLDSKVGGNYNYRYRLFRKSNLKPFERDISTEIYQAGNKPCNGVAGVNCYFPLQSYGFRPTYGVGHQPYRVVVLSFELLHAPATVCGPKKSTNLVKNKCVNFNFNGLTGTGVLTESNKKFLPFQQFGRDIADTTDAVRDPQTLEILDITPCSFGGVSVITPGTNTSNQVAVLYQGVNCTEVPVAIHADQLTPTWRVYSTGSNVFQTRAGCLIGAEYVNNSYECDIPIGAGICASYQTQTKSHRRARSVASQSIIAYTMSLGAENSVAYSNNSIAIPTNFTISVTTEILPVSMTKTSVDCTMYICGDSTECSNLLLQYGSFCTQLKRALTGIAVEQDKNTQEVFAQVKQIYKTPPIKYFGGFNFSQILPDPSKPSKRSFIEDLLFNKVTLADAGFIKQYGDCLGDIAARDLICAQKFNGLTVLPPLLTDEMIAQYTSALLAGTITSGWTFGAGAALQIPFAMQMAYRFNGIGVTQNVLYENQKLIANQFNSAIGKIQDSLSSTASALGKLQDVVNHNAQALNTLVKQLSSKFGAISSVLNDILSRLDPPEAEVQIDRLITGRLQSLQTYVTQQLIRAAEIRASANLAATKMSECVLGQSKRVDFCGKGYHLMSFPQSAPHGVVFLHVTYVPAQEKNFTTAPAICHDGKAHFPREGVFVSNGTHWFVTQRNFYEPQIITTDNTFVSGNCDVVIGIVNNTVYDPLQPELDSFKEELDKYFKNHTSPDVDLGDISGINASVVNIQKEIDRLNEVAKNLNESLIDLQELGKYEQYIKWPWYIWLGFIAGLIAIVMVTIMLCCMTSCCSCLKGCCSCGSCCKFDEDDSEPVLKGVKLHYT

SEQ ID NO: 285 - protein, 1273 aa, synthetic construct
MFVFLVLLPLVSSQCVNLTTRTQLPPAYTNSFTRGVYYPDKVFRSSVLHSTQDLFLPFFSNVTWFHAIHVSGTNGTKRFDNPVLPFNDGVYFASTEKSNIIRGWIFGTTLDSKTQSLLIVNNATNVVIKVCEFQFCNDPFLGVYYHKNNKSWMESEFRVYSSANNCTFEYVSQPFLMDLEGKQGNFKNLREFVFKNIDGYFKIYSKHTPINLVRDLPQGFSALEPLVDLPIGINITRFQTLLALHRSYLTPGDSSSGWTAGAAAYYVGYLQPRTFLLKYNENGTITDAVDCALDPLSETKCTLKSFTVEKGIYQTSNFRVQPTESIVRFPNITNLCPFGEVFNATRFASVYAWNRKRISNCVADYSVLYNSASFSTFKCYGVSPTKLNDLCFTNVYADSFVIRGDEVRQIAPGQTGKIADYNYKLPDDFTGCVIAWNSNNLDSKVGGNYNYLYRLFRKSNLKPFERDISTEIYQAGSTPCNGVEGFNCYFPLQSYGFQPTNGVGYQPYRVVVLSFELLHAPATVCGPKKSTNLVKNKCVNFNFNGLTGTGVLTESNKKFLPFQQFGRDIADTTDAVRDPQTLEILDITPCSFGGVSVITPGTNTSNQVAVLYQDVNCTEVPVAIHADQLTPTWRVYSTGSNVFQTRAGCLIGAEHVNNSYECDIPIGAGICASYQTQTNSPRRARSVASQSIIAYTMSLGAENSVAYSNNSIAIPTNFTISVTTEILPVSMTKTSVDCTMYICGDSTECSNLLLQYGSFCTQLNRALTGIAVEQDKNTQEVFAQVKQIYKTPPIKDFGGFNFSQILPDPSKPSKRSPIEDLLFNKVTLADAGFIKQYGDCLGDIAARDLICAQKFNGLTVLPPLLTDEMIAQYTSALLAGTITSGWTFGAGPALQIPFPMQMAYRFNGIGVTQNVLYENQKLIANQFNSAIGKIQDSLSSTPSALGKLQDVVNQNAQALNTLVKQLSSNFGAISSVLNDILSRLDPPEAEVQIDRLITGRLQSLQTYVTQQLIRAAEIRASANLAATKMSECVLGQSKRVDFCGKGYHLMSFPQSAPHGVVFLHVTYVPAQEKNFTTAPAICHDGKAHFPREGVFVSNGTHWFVTQRNFYEPQIITTDNTFVSGNCDVVIGIVNNTVYDPLQPELDSFKEELDKYFKNHTSPDVDLGDISGINASVVNIQKEIDRLNEVAKNLNESLIDLQELGKYEQYIKWPWYIWLGFIAGLIAIVMVTIMLCCMTSCCSCLKGCCSCGSCCKFDEDDSEPVLKGVKLHYT

SEQ ID NO: 286 - protein, 1268 aa, synthetic construct
MGVFLVLLPLVSSQCVNLITRTQSYTNSFTRGVYYPDKVFRSSVLHSTQDLFLPFFSNVTWFHAISGTNGIKRFDNPVLPFNDGVYFASTEKSNIIRGWIFGTTLDSKTQSLLIVNNATNVVIKVCEFQFCNDPFLDVYYHKNNKSWMESEFRVYSSANNCTFEYVSQPFLMDLEGKQGNFKNLREFVFKNIDGYFKIYSKHTPINLGRDLPQGFSALEPLVDLPIGINITRFQTLLALHRSYLTPGDSSSGWTAGAAAYYVGYLQPRTFLLKYNENGTITDAVDCALDPLSETKCTLKSFTVEKGIYQTSNFRVQPTESIVRFPNITNLCPFDEVFNATRFASVYAWNRKRISNCVADYSVLYNFAPFFAFKCYGVSPTKLNDLCFTNVYADSFVIRGNEVSQIAPGQTGNIADYNYKLPDDFTGCVIAWNSNNLDSKVGGNYNYRYRLFRKSNLKPFERDISTEIYQAGNKPCNGVAGVNCYFPLQSYGFRPTYGVGHQPYRVVVLSFELLHAPATVCGPKKSTNLVKNKCVNFNFNGLTGTGVLTESNKKFLPFQQFGRDIADTTDAVRDPQTLEILDITPCSFGGVSVITPGTNTSNQVAVLYQGVNCTEVPVAIHADQLTPTWRVYSTGSNVFQTRAGCLIGAEYVNNSYECDIPIGAGICASYQTQTKSHRRARSVASQSIIAYTMSLGAENSVAYSNNSIAIPTNFTISVTTEILPVSMTKTSVDCTMYICGDSTECSNLLLQYGSFCTQLKRALTGIAVEQDKNTQEVFAQVKQIYKTPPIKYFGGFNFSQILPDPSKPSKRSPIEDLLFNKVTLADAGFIKQYGDCLGDIAARDLICAQKFNGLTVLPPLLTDEMIAQYTSALLAGTITSGWTFGAGPALQIPFPMQMAYRFNGIGVTQNVLYENQKLIANQFNSAIGKIQDSLSSTPSALGKLQDVVNHNAQALNTLVKQLSSKFGAISSVLNDILSRLDPPEAEVQIDRLITGRLQSLQTYVTQQLIRAAEIRASANLAATKMSECVLGQSKRVDFCGKGYHLMSFPQSAPHGVVFLHVTYVPAQEKNFTTAPAICHDGKAHFPREGVFVSNGTHWFVTQRNFYEPQIITTDNTFVSGNCDVVIGIVNNTVYDPLQPELDSFKEELDKYFKNHTSPDVDLGDISGINASVVNIQKEIDRLNEVAKNLNESLIDLQELGKYEQYIKWPWYIWLGFIAGLIAIVMVTIMLCCMTSCCSCLKGCCSCGSCCKFDEDDSEPVLKGVKLHYT

SEQ ID NO: 287 - protein, 627 aa, synthetic construct
MGVTAPRTLILLLSGALALTETWAGSAVGACVLCNSQTSLRCGACIRRPFLCCKCCYDHVISTSHKLVLSVNPYVCNAPGCDVTDVTQLYLGGMSYYCKSHKPPISFPLCANGQVFGLYKNTCVGSDNVTDFNAIATCDWTNAGDYILANTCTERLKLFAAETLKATEETFKLSYGIATVREVLSDRELHLSWEVGKPRPPLNRNYVFTGYRVTKNSKVQIGEYTFEKGDYGDAVVYRGTTTYKLNVGDYFVLTSHTVMPLSAPTLVPQEHYVRITGLYPTLNISDEFSSNVANYQKVGMQKYSTLQGPPGTGKSHFAIGLALYYPSARIVYTACSHAAVDALCEKALKYLPIDKCSRIIPARARVECFDKFKVNSTLEQYVFCTVNALPETTADIVVFDEISMATNYDLSVVNARLRAKHYVYIGDPAQLPAPRTLLTKGTLEPEYFNSVCRLMKTIGPDMFLGTCRRCPAEIVDTVSALVYDNKLKAHKDKSAQCFKMFYKGVITHDVSSAINRPQIGVVREFLTRNPAWRKAVFISPYNSQNAVASKILGLPTQTVDSSQGSEYDYVIFTQTTETAHSCNVNRFNVAITRAKVGILCIMSDRDLYDKLQFTSLEIPRRNVATLQ

SEQ ID NO: 288 - protein, 958 aa, synthetic construct
MGVTAPRTLILLLSGALALTETWAGSSADAQSFLNRVCGVSAARLTPCGTGTSTDVVYRAFDIYNDKVAGFAKFLKTNCCRFQEKDEDDNLIDSYFVVKRHTFSNYQHEETIYNLLKDCPAVAKHDFFKFRIDGDMVPHISRQRLTKYTMADLVYALRHFDEGNCDTLKEILVTYNCCDDDYFNKKDWYDFVENPDILRVYANLGERVRQALLKTVQFCDAMRNAGIVGVLTLDNQDLNGNWYDFGDFIQTTPGSGVPVVDSYYSLLMPILTLTRALTAESHVDTDLTKPYIKWDLLKYDFTEERLKLFDRYFKYWDQTYHPNCVNCLDDRCILHCANFNVLFSTVFPPTSFGPLVRKIFVDGVPFVVSTGYHFRELGVVHNQDVNLHSSRLSFKELLVYAADPAMHAASGNLLLDKRTTCFSVAALTNNVAFQTVKPGNFNKDFYDFAVSKGFFKEGSSVELKHFFFAQDGNAAISDYDYYRYNLPTMCDIRQLLFVVEVVDKYFDCYDGGCINANQVIVNNLDKSAGFPFNKWGKARLYYDSMSYEDQDALFAYTKRNVIPTITQMNLKYAISAKNRARTVAGVSICSTMTNRQFHQKLLKSIAATRGATVVIGTSKFYGGWHNMLKTVYSDVENPHLMGWDYPKCDRAMPNMLRIMASLVLARKHTTCCSLSHRFYRLANECAQVLSEMVMCGGSLYVKPGGTSSGDATTAYANSVFNICQAVTANVNALLSTDGNKIADKYVRNLQHRLYECLYRNRDVDTDFVNEFYAYLRKHFSMMILSDDAVVCFNSTYASQGLVASIKNFKSVLYYQNNVFMSEAKCWTETDLTKGPHEFCSQHTMLVKQGDDYVYLPYPDPSRILGAGCFVDDIVKTDGTLMIERFVSLAIDAYPLTKHPNQEYADVFHLYLQYIRKLHDELTGHMLDMYSVMLTNDNTSRYWEPEFYEAMYTPHTVLQ

SEQ ID NO: 289 - protein, 109 aa, synthetic construct
MGVTAPRTLILLLSGALALTETWAGSSKMSDVKCTSVVLLSVLQQLRVESSSKLWAQCVQLHNDILLAKDTTEAFEKMVSLLSVLLSMQGAVDINKLCEEMLDNRATLQ

SEQ ID NO: 290 - protein, 1638 aa, synthetic construct
MGAVGACVLCNSQTSLRCGACIRRPFLCCKCCYDHVISTSHKLVLSVNPYVCNAPGCDVTDVTQLYLGGMSYYCKSHKPPISFPLCANGQVFGLYKNTCVGSDNVTDFNAIATCDWTNAGDYILANTCTERLKLFAAETLKATEETFKLSYGIATVREVLSDRELHLSWEVGKPRPPLNRNYVFTGYRVTKNSKVQIGEYTFEKGDYGDAVVYRGTTTYKLNVGDYFVLTSHTVMPLSAPTLVPQEHYVRITGLYPTLNISDEFSSNVANYQKVGMQKYSTLQGPPGTGKSHFAIGLALYYPSARIVYTACSHAAVDALCEKALKYLPIDKCSRIIPARARVECFDKFKVNSTLEQYVFCTVNALPETTADIVVFDEISMATNYDLSVVNARLRAKHYVYIGDPAQLPAPRTLLTKGTLEPEYFNSVCRLMKTIGPDMFLGTCRRCPAEIVDTVSALVYDNKLKAHKDKSAQCFKMFYKGVITHDVSSAINRPQIGVVREFLTRNPAWRKAVFISPYNSQNAVASKILGLPTQTVDSSQGSEYDYVIFTQTTETAHSCNVNRFNVAITRAKVGILCIMSDRDLYDKLQFTSLEIPRRNVATLQGGGGSGGGGSSADAQSFLNRVCGVSAARLTPCGTGTSTDVVYRAFDIYNDKVAGFAKFLKTNCCRFQEKDEDDNLIDSYFVVKRHTFSNYQHEETIYNLLKDCPAVAKHDFFKFRIDGDMVPHISRQRLTKYTMADLVYALRHFDEGNCDTLKEILVTYNCCDDDYFNKKDWYDFVENPDILRVYANLGERVRQALLKTVQFCDAMRNAGIVGVLTLDNQDLNGNWYDFGDFIQTTPGSGVPVVDSYYSLLMPILTLTRALTAESHVDTDLTKPYIKWDLLKYDFTEERLKLFDRYFKYWDQTYHPNCVNCLDDRCILHCANFNVLFSTVFPPTSFGPLVRKIFVDGVPFVVSTGYHFRELGVVHNQDVNLHSSRLSFKELLVYAADPAMHAASGNLLLDKRTTCFSVAALTNNVAFQTVKPGNFNKDFYDFAVSKGFFKEGSSVELKHFFFAQDGNAAISDYDYYRYNLPTMCDIRQLLFVVEVVDKYFDCYDGGCINANQVIVNNLDKSAGFPFNKWGKARLYYDSMSYEDQDALFAYTKRNVIPTITQMNLKYAISAKNRARTVAGVSICSTMTNRQFHQKLLKSIAATRGATVVIGTSKFYGGWHNMLKTVYSDVENPHLMGWDYPKCDRAMPNMLRIMASLVLARKHTTCCSLSHRFYRLANECAQVLSEMVMCGGSLYVKPGGTSSGDATTAYANSVFNICQAVTANVNALLSTDGNKIADKYVRNLQHRLYECLYRNRDVDTDFVNEFYAYLRKHFSMMILSDDAVVCFNSTYASQGLVASIKNFKSVLYYQNNVFMSEAKCWTETDLTKGPHEFCSQHTMLVKQGDDYVYLPYPDPSRILGAGCFVDDIVKTDGTLMIERFVSLAIDAYPLTKHPNQEYADVFHLYLQYIRKLHDELTGHMLDMYSVMLTNDNTSRYWEPEFYEAMYTPHTVLQGGGGSGGGGSSKMSDVKCTSVVLLSVLQQLRVESSSKLWAQCVQLHNDILLAKDTTEAFEKMVSLLSVLLSMQGAVDINKLCEEMLDNRATLQ

SEQ ID NO: 291 - protein, 1646 aa, synthetic construct
MGAVGACVLCNSQTSLRCGACIRRPFLCCKCCYDHVISTSHKLVLSVNPYVCNAPGCDVTDVTQLYLGGMSYYCKSHKPPISFPLCANGQVFGLYKNTCVGSDNVTDFNAIATCDWTNAGDYILANTCTERLKLFAAETLKATEETFKLSYGIATVREVLSDRELHLSWEVGKPRPPLNRNYVFTGYRVTKNSKVQIGEYTFEKGDYGDAVVYRGTTTYKLNVGDYFVLTSHTVMPLSAPTLVPQEHYVRITGLYPTLNISDEFSSNVANYQKVGMQKYSTLQGPPGTGKSHFAIGLALYYPSARIVYTACSHAAVDALCEKALKYLPIDKCSRIIPARARVECFDKFKVNSTLEQYVFCTVNALPETTADIVVFDEISMATNYDLSVVNARLRAKHYVYIGDPAQLPAPRTLLTKGTLEPEYFNSVCRLMKTIGPDMFLGTCRRCPAEIVDTVSALVYDNKLKAHKDKSAQCFKMFYKGVITHDVSSAINRPQIGVVREFLTRNPAWRKAVFISPYNSQNAVASKILGLPTQTVDSSQGSEYDYVIFTQTTETAHSCNVNRFNVAITRAKVGILCIMSDRDLYDKLQFTSLEIPRRNVATLQGGGGRSKRSGGGGSSADAQSFLNRVCGVSAARLTPCGTGTSTDVVYRAFDIYNDKVAGFAKFLKTNCCRFQEKDEDDNLIDSYFVVKRHTFSNYQHEETIYNLLKDCPAVAKHDFFKFRIDGDMVPHISRQRLTKYTMADLVYALRHFDEGNCDTLKEILVTYNCCDDDYFNKKDWYDFVENPDILRVYANLGERVRQALLKTVQFCDAMRNAGIVGVLTLDNQDLNGNWYDFGDFIQTTPGSGVPVVDSYYSLLMPILTLTRALTAESHVDTDLTKPYIKWDLLKYDFTEERLKLFDRYFKYWDQTYHPNCVNCLDDRCILHCANFNVLFSTVFPPTSFGPLVRKIFVDGVPFVVSTGYHFRELGVVHNQDVNLHSSRLSFKELLVYAADPAMHAASGNLLLDKRTTCFSVAALTNNVAFQTVKPGNFNKDFYDFAVSKGFFKEGSSVELKHFFFAQDGNAAISDYDYYRYNLPTMCDIRQLLFVVEVVDKYFDCYDGGCINANQVIVNNLDKSAGFPFNKWGKARLYYDSMSYEDQDALFAYTKRNVIPTITQMNLKYAISAKNRARTVAGVSICSTMTNRQFHQKLLKSIAATRGATVVIGTSKFYGGWHNMLKTVYSDVENPHLMGWDYPKCDRAMPNMLRIMASLVLARKHTTCCSLSHRFYRLANECAQVLSEMVMCGGSLYVKPGGTSSGDATTAYANSVFNICQAVTANVNALLSTDGNKIADKYVRNLQHRLYECLYRNRDVDTDFVNEFYAYLRKHFSMMILSDDAVVCFNSTYASQGLVASIKNFKSVLYYQNNVFMSEAKCWTETDLTKGPHEFCSQHTMLVKQGDDYVYLPYPDPSRILGAGCFVDDIVKTDGTLMIERFVSLAIDAYPLTKHPNQEYADVFHLYLQYIRKLHDELTGHMLDMYSVMLTNDNTSRYWEPEFYEAMYTPHTVLQGGGGRSKRSGGGGSSKMSDVKCTSVVLLSVLQQLRVESSSKLWAQCVQLHNDILLAKDTTEAFEKMVSLLSVLLSMQGAVDINKLCEEMLDNRATLQ

SEQ ID NO: 292 - DNA, 3804 bp, synthetic construct
  source 1..3804: mol_type = other DNA
atgggcgtttttcttgttttattgccactagtctctagtcagtgtgttaatcttataaccagaactcaatcatacactaattctttcacacgtggtgtttattaccctgacaaagttttcagatcctcagttttacattcaactcaggacttgttcttacctttcttttccaatgttacttggttccatgctatctctgggaccaatggtatcaagaggtttgataaccctgtcctaccatttaatgatggtgtttattttgcttccactgagaagtctaacataataagaggctggatttttggtactactttagattcgaagacccagtccctacttattgttaataacgctactaatgttgttattaaagtctgtgaatttcaattttgtaatgatccatttttggatgtttattaccacaaaaacaacaaaagttggatggaaagtgagttcagagtttattctagtgcgaataattgcacttttgaatatgtctctcagccttttcttatggaccttgaaggaaaacagggtaatttcaaaaatcttagggaatttgtgtttaagaatattgatggttattttaaaatatattctaagcacacgcctattaatttagggcgtgatctccctcagggtttttcggctttagaaccattggtagatttgccaataggtattaacatcactaggtttcaaactttacttgctttacatagaagttatttgactcctggtgattcttcttcaggttggacagctggtgctgcagcttattatgtgggttatcttcaacctaggacttttctattaaaatataatgaaaatggaaccattacagatgctgtagactgtgcacttgaccctctctcagaaacaaagtgtacgttgaaatccttcactgtagaaaaaggaatctatcaaacttctaactttagagtccaaccaacagaatctattgttagatttcctaatattacaaacttgtgcccttttgatgaagtttttaacgccaccagatttgcatccgtgtatgcttggaacaggaagagaatcagcaactgtgttgctgattattctgtcctatataatttcgcaccatttttcgcttttaagtgttatggagtgtctcctactaaattaaatgatctctgctttactaatgtctatgcagattcatttgtaattagaggtaatgaagtcagccaaatcgctccagggcaaactggaaatattgctgattataattataaattaccagatgattttacaggctgcgttatagcttggaattctaacaaccttgattctaaggttggtggtaattataattaccggtatagattgtttaggaagtctaatctcaaaccttttgagagagatatttcaactgaaatctatcaggccggtaacaaaccttgtaatggtgttgcaggtgttaattgttactttcctttacaatcatatggtttccgacccacttatggtgttggtcaccaaccatacagagtagtagtactttcttttgaacttctacatgcaccagcaactgtttgtggacctaaaaagtctactaatttggttaaaaacaaatgtgtcaatttcaacttcaatggtttaacaggcacaggtgttcttactgagtctaacaaaaagtttctgcctttccaacaatttggcagagacattgctgacactactgatgctgtccgtgatccacagacacttgagattcttgacattacaccatgttcttttggtggtgtcagtgttataacaccaggaacaaatacttctaaccaggttgctgttctttatcagggtgttaactgcacagaagtccctgttgctattcatgcagatcaacttactcctacttggcgtgtttattctacaggttctaatgtttttcaaacacgtgcaggctgtttaataggggctgaatatgtcaacaactcatatgagtgtgacatacccattggtgcaggtatatgcgctagttatcagactcagactaagtctcatcggcgggcacgtagtgtagctagtcaatccatcattgcctacactatgtcacttggtgcagaaaattcagttgcttactctaataactctattgccatacccacaaattttactattagtgttaccacagaaattctaccagtgtctatgaccaagacatcagtagattgtacaatgtacatttgtggtgattcaactgaatgcagcaatcttttgttgcaatatggcagtttttgtacacaattaaaacgtgctttaactggaatagctgttgaacaagacaaaaacacccaagaagtttttgcacaagtcaaacaaatttacaaaacaccaccaattaaatattttggtggttttaatttttcacaaatattaccagatccatcaaaaccaagcaagaggtcatttattgaagatctacttttcaacaaagtgacacttgcagatgctggcttcatcaaacaatatggtgattgccttggtgatattgctgctagagacctcatttgtgcacaaaagtttaacggccttactgttttgccacctttgctcacagatgaaatgattgctcaatacacttctgcactgttagcgggtacaatcacttctggttggacctttggtgcaggtgctgcattacaaataccatttgctatgcaaatggcttataggtttaatggtattggagttacacagaatgttctctatgagaaccaaaaattgattgccaaccaatttaatagtgctattggcaaaattcaagactcactttcttccacagcaagtgcacttggaaaacttcaagatgtggtcaaccataatgcacaagctttaaacacgcttgttaaacaacttagctccaaatttggtgcaatttcaagtgttttaaatgatatcctttcacgtcttgaccctcccgaggctgaagtgcaaattgataggttgatcacaggcagacttcaaagtttgcagacatatgtgactcaacaattaattagagctgcagaaatcagagcttctgctaatcttgctgctactaaaatgtcagagtgtgtacttggacaatcaaaaagagttgatttttgtggaaagggctatcatcttatgtccttccctcagtcagcacctcatggtgtagtcttcttgcatgtgacttatgtccctgcacaagaaaagaacttcacaactgctcctgccatttgtcatgatggaaaagcacactttcctcgtgaaggtgtctttgtttcaaatggcacacactggtttgtaacacaaaggaatttttatgaaccacaaatcattactacagacaacacatttgtgtctggtaactgtgatgttgtaataggaattgtcaacaacacagtttatgatcctttgcaacctgaattagattcattcaaggaggagttagataaatattttaagaatcatacatcaccagatgttgatttaggtgacatctctggcattaatgcttcagttgtaaacattcaaaaagaaattgaccgcctcaatgaggttgccaagaatttaaatgaatctctcatcgatctccaagaacttggaaagtatgagcagtatataaaatggccatggtacatttggctaggttttatagctggcttgattgccatagtaatggtgacaattatgctttgctgtatgaccagttgctgtagttgtctcaagggctgttgttcttgtggatcctgctgcaaatttgatgaagacgactctgagccagtgctcaaaggagtcaaattacattacaca

SEQ ID NO: 293 - DNA, 3804 bp, synthetic construct
  source 1..3804: mol_type = other DNA
atgggcgtttttcttgttttattgccactagtctctagtcagtgtgttaatcttatcaccagaactcaaagctacactaattctttcacacgtggtgtttattaccctgacaaagttttcagatcctcagttttacattcaactcaggatttgttcttacctttcttttccaatgttacttggttccatgctatatctgggaccaatggtatcaagaggtttgataaccctgtcctaccatttaatgatggtgtttattttgcttccactgagaagtctaacataataagaggctggatctttggtactactttagattcgaagacccagtccctacttattgttaataacgctactaatgttgttattaaagtctgtgaatttcaattttgtaatgatccatttttggacgtttattaccacaaaaacaacaaaagttggatggaaagtgagttcagagtttattctagtgcgaataattgcacttttgaatatgtctctcagccttttcttatggaccttgaaggaaaacagggtaatttcaaaaatcttagggaatttgtgtttaagaatattgatggttattttaaaatatattctaagcacacgcctattaatttaggccgtgatctccctcagggtttttcggctttagaaccattggtagatttgccaataggtattaacatcactaggtttcaaactttacttgctttacatagaagttatttgactcctggtgattcttcttcaggttggacagctggtgctgcagcttattatgtgggttatcttcaacctaggacttttctattaaaatataatgaaaatggaaccattacagatgctgtagactgtgcacttgaccctctctcagaaacaaagtgtacgttgaaatccttcactgtagaaaaaggaatctatcaaacttctaactttagagtccaaccaacagaatctattgttagatttcctaatattacaaacttgtgcccttttgacgaagtttttaacgccaccagatttgcatccgtgtatgcttggaacaggaagagaatcagcaactgtgttgctgattattctgtcctatataatttcgcaccctttttcgcctttaagtgttatggagtgtctcctactaaattaaatgatctctgctttactaatgtctatgcagattcatttgtaattagaggtaacgaagtcagccaaatcgctccagggcaaactggaaatattgctgattataattataaattaccagatgattttacaggctgcgttatagcttggaattctaacaatcttgattctaaggttggtggtaattataattaccggtatagattgtttaggaagtctaatctcaaaccttttgagagagatatttcaactgaaatctatcaggccggtaacaagccttgtaatggtgttgccggtgtgaattgttactttcctttacaatcatatggtttccggcccacttacggtgttggtcaccaaccatacagagtagtagtactttcttttgaacttctacatgcaccagcaactgtttgtggacctaaaaagtctactaatttggttaaaaacaaatgtgtcaatttcaacttcaatggtttaacaggcacaggtgttcttactgagtctaacaaaaagtttctgcctttccaacaatttggcagagacattgctgacactactgatgctgtccgtgatccacagacacttgagattcttgacattacaccatgttcttttggtggtgtcagtgttataacaccaggaacaaatacttctaaccaggttgctgttctttatcagggcgttaactgcacagaagtccctgttgctattcatgcagatcaacttactcctacttggcgtgtttattctacaggttctaatgtttttcaaacacgtgcaggctgtttaataggggctgaatacgtcaacaactcatatgagtgtgacatacccattggtgcaggtatatgcgctagttatcagactcagactaagtctcaccggcgggcacgtagtgtagctagtcaatccatcattgcctacactatgtcacttggtgcagaaaattcagttgcttactctaataactctattgccatacccacaaattttactattagcgtgaccactgaaatcctccccgtgagcatgaccaagaccagcgtggactgcaccatgtacatctgcggcgacagcaccgagtgcagcaacctgctcctgcagtacggcagcttctgcacccagctgaagcgtgctttaactgggatagctgttgaacaagacaaaaacacccaagaagtttttgcacaagtcaaacaaatttacaaaacaccaccaattaaatactttggtggttttaatttttcacaaatattaccagatccatcaaaaccaagcaagaggtcatttattgaagatctacttttcaacaaagtgacacttgcagatgctggcttcatcaaacaatatggtgattgccttggtgatattgctgctagggacctcatttgtgcacaaaagtttaacggccttactgttttgccacctttgctcacagatgaaatgattgctcaatacacttctgcactgttagcgggtacaatcacttctggttggacctttggtgcaggtgctgcattacaaataccatttgctatgcaaatggcttataggtttaatggtattggagttacacagaatgttctctatgagaaccaaaaattgattgccaaccaatttaatagtgccattggcaaaattcaagactcactttcttccacagcaagtgcacttggaaaacttcaagatgtggtcaaccacaatgcacaagctttaaacacgcttgttaaacaacttagctccaagtttggtgcaatttcaagtgttttaaatgatatcctttcacgtcttgaccctcccgaggctgaagtgcaaattgataggttgatcacaggcagacttcaaagtttgcagacatatgtgactcaacaattaattagagctgcagaaatcagagcttctgctaatcttgctgctactaaaatgtcagagtgtgtacttggacaatcaaaaagagttgatttttgtggaaagggctatcatcttatgtccttccctcagtcagcacctcatggtgtagtcttcttgcatgtgacttatgtccctgcacaagaaaagaacttcacaactgctcctgccatttgtcatgatggaaaagcacactttcctcgtgaaggtgtctttgtttcaaatggcacacactggtttgtaacacaaaggaatttttatgaaccacaaatcattactacagacaacacatttgtgtctggtaactgtgatgttgtaataggaattgtcaacaacacagtttatgatcctttgcaacctgaattagactcattcaaggaggagttagataaatattttaagaatcatacatcaccagatgttgatttaggtgacatctctggcattaatgcttcagttgtaaacattcaaaaagaaattgaccgcctcaatgaggttgccaagaatttaaatgaatctctcatcgatctccaagaacttggaaagtatgagcagtatataaaatggccatggtacatttggctaggttttatagctggcttgattgccatagtaatggtgacaattatgctttgctgtatgaccagttgctgtagttgtctcaagggctgttgttcttgtggatcctgctgcaaatttgatgaagacgactctgagccagtgctcaaaggagtcaaattacattacaca

SEQ ID NO: 294 - DNA, 3819 bp, synthetic construct
  source 1..3819: mol_type = other DNA
atgtttgtttttcttgttttattgccactagtctctagtcagtgtgttaatcttacaaccagaactcaattaccccctgcatacactaattctttcacacgtggtgtttattaccctgacaaagttttcagatcctcagttttacattcaactcaggatttgttcttacctttcttttccaatgttacttggttccatgctatacatgtctctgggaccaatggtactaagaggtttgataaccctgtcctaccatttaatgatggtgtttattttgcttccactgagaagtctaacataataagaggctggatctttggtactactttagattcgaagacccagtccctacttattgttaataacgctactaatgttgttattaaagtctgtgaatttcaattttgtaatgatccatttttgggtgtttattaccacaaaaacaacaaaagttggatggaaagtgagttcagagtttattctagtgcgaataattgcacttttgaatatgtctctcagccttttcttatggaccttgaaggaaaacagggtaatttcaaaaatcttagggaatttgtgtttaagaatattgatggttattttaaaatatattctaagcacacgcctattaatttagtgcgtgatctccctcagggtttttcggctttagaaccattggtagatttgccaataggtattaacatcactaggtttcaaactttacttgctttacatagaagttatttgactcctggtgattcttcttcaggttggacagctggtgctgcagcttattatgtgggttatcttcaacctaggacttttctattaaaatataatgaaaatggaaccattacagatgctgtagactgtgcacttgaccctctctcagaaacaaagtgtacgttgaaatccttcactgtagaaaaaggaatctatcaaacttctaactttagagtccaaccaacagaatctattgttagatttcctaatattacaaacttgtgcccttttggtgaagtttttaacgccaccagatttgcatccgtgtatgcttggaacaggaagagaatcagcaactgtgttgctgattattctgtcctatataattccgcatcattttccacttttaagtgttatggagtgtctcctactaaattaaatgatctctgctttactaatgtctatgcagattcatttgtaattagaggtgatgaagtcagacaaatcgctccagggcaaactggaaagattgctgattataattataaattaccagatgattttacaggctgcgttatagcttggaattctaacaatcttgattctaaggttggtggtaattataattacctgtatagattgtttaggaagtctaatctcaaaccttttgagagagatatttcaactgaaatctatcaggccggtagcacaccttgtaatggtgttgaaggttttaattgttactttcctttacaatcatatggtttccaacccactaatggtgttggttaccaaccatacagagtagtagtactttcttttgaacttctacatgcaccagcaactgtttgtggacctaaaaagtctactaatttggttaaaaacaaatgtgtcaatttcaacttcaatggtttaacaggcacaggtgttcttactgagtctaacaaaaagtttctgcctttccaacaatttggcagagacattgctgacactactgatgctgtccgtgatccacagacacttgagattcttgacattacaccatgttcttttggtggtgtcagtgttataacaccaggaacaaatacttctaaccaggttgctgttctttatcaggatgttaactgcacagaagtccctgttgctattcatgcagatcaacttactcctacttggcgtgtttattctacaggttctaatgtttttcaaacacgtgcaggctgtttaataggggctgaacatgtcaacaactcatatgagtgtgacatacccattggtgcaggtatatgcgctagttatcagactcagactaattctcctcggcgggcacgtagtgtagctagtcaatccatcattgcctacactatgtcacttggtgcagaaaattcagttgcttactctaataactctattgccatacccacaaattttactattagtgttaccacagaaattctaccagtgtctatgaccaagacatcagtagattgtacaatgtacatttgtggtgattcaactgaatgcagcaatcttttgttgcaatatggcagtttttgtacacaattaaaccgtgctttaactgggatagctgttgaacaagacaaaaacacccaagaagtttttgcacaagtcaaacaaatttacaaaacaccaccaattaaagattttggtggttttaatttttcacaaatattaccagatccatcaaaaccaagcaagaggtcacctattgaagatctacttttcaacaaagtgacacttgcagatgctggcttcatcaaacaatatggtgattgccttggtgatattgctgctagggacctcatttgtgcacaaaagtttaacggccttactgttttgccacctttgctcacagatgaaatgattgctcaatacacttctgcactgttagcgggtacaatcacttctggttggacctttggtgcaggtcctgcattacaaataccatttcctatgcaaatggcttataggtttaatggtattggagttacacagaatgttctctatgagaaccaaaaattgattgccaaccaatttaatagtgccattggcaaaattcaagactcactttcttccacacctagtgcacttggaaaacttcaagatgtggtcaaccaaaatgcacaagctttaaacacgcttgttaaacaacttagctccaattttggtgcaatttcaagtgttttaaatgatatcctttcacgtcttgaccctcccgaggctgaagtgcaaattgataggttgatcacaggcagacttcaaagtttgcagacatatgtgactcaacaattaattagagctgcagaaatcagagcttctgctaatcttgctgctactaaaatgtcagagtgtgtacttggacaatcaaaaagagttgatttttgtggaaagggctatcatcttatgtccttccctcagtcagcacctcatggtgtagtcttcttgcatgtgacttatgtccctgcacaagaaaagaacttcacaactgctcctgccatttgtcatgatggaaaagcacactttcctcgtgaaggtgtctttgtttcaaatggcacacactggtttgtaacacaaaggaatttttatgaaccacaaatcattactacagacaacacatttgtgtctggtaactgtgatgttgtaataggaattgtcaacaacacagtttatgatcctttgcaacctgaattagactcattcaaggaggagttagataaatattttaagaatcatacatcaccagatgttgatttaggtgacatctctggcattaatgcttcagttgtaaacattcaaaaagaaattgaccgcctcaatgaggttgccaagaatttaaatgaatctctcatcgatctccaagaacttggaaagtatgagcagtatataaaatggccatggtacatttggctaggttttatagctggcttgattgccatagtaatggtgacaattatgctttgctgtatgaccagttgctgtagttgtctcaagggctgttgttcttgtggatcctgctgcaaatttgatgaagacgactctgagccagtgctcaaaggagtcaaattacattacaca

SEQ ID NO: 295 - DNA, 3804 bp, synthetic construct
  source 1..3804: mol_type = other DNA
atgggcgtttttcttgttttattgccactagtctctagtcagtgtgttaatcttatcaccagaactcaaagctacactaattctttcacacgtggtgtttattaccctgacaaagttttcagatcctcagttttacattcaactcaggatttgttcttacctttcttttccaatgttacttggttccatgctatatctgggaccaatggtatcaagaggtttgataaccctgtcctaccatttaatgatggtgtttattttgcttccactgagaagtctaacataataagaggctggatctttggtactactttagattcgaagacccagtccctacttattgttaataacgctactaatgttgttattaaagtctgtgaatttcaattttgtaatgatccatttttggacgtttattaccacaaaaacaacaaaagttggatggaaagtgagttcagagtttattctagtgcgaataattgcacttttgaatatgtctctcagccttttcttatggaccttgaaggaaaacagggtaatttcaaaaatcttagggaatttgtgtttaagaatattgatggttattttaaaatatattctaagcacacgcctattaatttaggccgtgatctccctcagggtttttcggctttagaaccattggtagatttgccaataggtattaacatcactaggtttcaaactttacttgctttacatagaagttatttgactcctggtgattcttcttcaggttggacagctggtgctgcagcttattatgtgggttatcttcaacctaggacttttctattaaaatataatgaaaatggaaccattacagatgctgtagactgtgcacttgaccctctctcagaaacaaagtgtacgttgaaatccttcactgtagaaaaaggaatctatcaaacttctaactttagagtccaaccaacagaatctattgttagatttcctaatattacaaacttgtgcccttttgacgaagtttttaacgccaccagatttgcatccgtgtatgcttggaacaggaagagaatcagcaactgtgttgctgattattctgtcctatataatttcgcaccctttttcgcctttaagtgttatggagtgtctcctactaaattaaatgatctctgctttactaatgtctatgcagattcatttgtaattagaggtaacgaagtcagccaaatcgctccagggcaaactggaaatattgctgattataattataaattaccagatgattttacaggctgcgttatagcttggaattctaacaatcttgattctaaggttggtggtaattataattaccggtatagattgtttaggaagtctaatctcaaaccttttgagagagatatttcaactgaaatctatcaggccggtaacaagccttgtaatggtgttgccggtgtgaattgttactttcctttacaatcatatggtttccggcccacttacggtgttggtcaccaaccatacagagtagtagtactttcttttgaacttctacatgcaccagcaactgtttgtggacctaaaaagtctactaatttggttaaaaacaaatgtgtcaatttcaacttcaatggtttaacaggcacaggtgttcttactgagtctaacaaaaagtttctgcctttccaacaatttggcagagacattgctgacactactgatgctgtccgtgatccacagacacttgagattcttgacattacaccatgttcttttggtggtgtcagtgttataacaccaggaacaaatacttctaaccaggttgctgttctttatcagggcgttaactgcacagaagtccctgttgctattcatgcagatcaacttactcctacttggcgtgtttattctacaggttctaatgtttttcaaacacgtgcaggctgtttaataggggctgaatacgtcaacaactcatatgagtgtgacatacccattggtgcaggtatatgcgctagttatcagactcagactaagtctcaccggcgggcacgtagtgtagctagtcaatccatcattgcctacactatgtcacttggtgcagaaaattcagttgcttactctaataactctattgccatacccacaaattttactattagcgtgaccactgaaatcctccccgtgagcatgaccaagaccagcgtggactgcaccatgtacatctgcggcgacagcaccgagtgcagcaacctgctcctgcagtacggcagcttctgcacccagctgaagcgtgctttaactgggatagctgttgaacaagacaaaaacacccaagaagtttttgcacaagtcaaacaaatttacaaaacaccaccaattaaatactttggtggttttaatttttcacaaatattaccagatccatcaaaaccaagcaagaggtcacctattgaagatctacttttcaacaaagtgacacttgcagatgctggcttcatcaaacaatatggtgattgccttggtgatattgctgctagggacctcatttgtgcacaaaagtttaacggccttactgttttgccacctttgctcacagatgaaatgattgctcaatacacttctgcactgttagcgggtacaatcacttctggttggacctttggtgcaggtcctgcattacaaataccatttcctatgcaaatggcttataggtttaatggtattggagttacacagaatgttctctatgagaaccaaaaattgattgccaaccaatttaatagtgccattggcaaaattcaagactcactttcttccacacctagtgcacttggaaaacttcaagatgtggtcaaccacaatgcacaagctttaaacacgcttgttaaacaacttagctccaagtttggtgcaatttcaagtgttttaaatgatatcctttcacgtcttgaccctcccgaggctgaagtgcaaattgataggttgatcacaggcagacttcaaagtttgcagacatatgtgactcaacaattaattagagctgcagaaatcagagcttctgctaatcttgctgctactaaaatgtcagagtgtgtacttggacaatcaaaaagagttgatttttgtggaaagggctatcatcttatgtccttccctcagtcagcacctcatggtgtagtcttcttgcatgtgacttatgtccctgcacaagaaaagaacttcacaactgctcctgccatttgtcatgatggaaaagcacactttcctcgtgaaggtgtctttgtttcaaatggcacacactggtttgtaacacaaaggaatttttatgaaccacaaatcattactacagacaacacatttgtgtctggtaactgtgatgttgtaataggaattgtcaacaacacagtttatgatcctttgcaacctgaattagactcattcaaggaggagttagataaatattttaagaatcatacatcaccagatgttgatttaggtgacatctctggcattaatgcttcagttgtaaacattcaaaaagaaattgaccgcctcaatgaggttgccaagaatttaaatgaatctctcatcgatctccaagaacttggaaagtatgagcagtatataaaatggccatggtacatttggctaggttttatagctggcttgattgccatagtaatggtgacaattatgctttgctgtatgaccagttgctgtagttgtctcaagggctgttgttcttgtggatcctgctgcaaatttgatgaagacgactctgagccagtgctcaaaggagtcaaattacattacaca

SEQ ID NO: 296 - DNA, 1881 bp, synthetic construct
  source 1..1881: mol_type = other DNA
atgggcgtgaccgccccccggaccctgatcctgctcctgagcggcgccctggccctgaccgaaacctgggccggcagcgccgtgggcgcctgcgtgctgtgtaacagtcagaccagcctgcggtgcggcgcctgcatccgcaggcccttcctgtgctgtaagtgctgctacgaccacgtgattagcacaagccacaagctcgtgctcagcgtgaacccctacgtgtgcaacgcccccggctgcgacgtgacagacgtgacccagctgtacctgggcggaatgagctactattgtaagagtcacaagccccctatcagcttccccctgtgcgccaacggccaggtgttcggcctgtacaagaacacctgcgtgggcagcgacaacgtgaccgacttcaacgccatcgccacctgcgactggaccaacgccggcgactacatcctggccaacacctgcaccgagcggctgaagctgttcgccgctgaaacactgaaggccaccgaggaaaccttcaagctgagctacggcatcgccaccgtgcgggaggtgctcagcgatcgggaactgcacctgagctgggaggtgggcaagccccggcctcctctgaaccggaactacgtgttcaccggctaccgggtgaccaagaacagcaaggtgcagatcggcgagtacaccttcgagaagggcgactacggcgacgccgtggtctaccggggcaccacaacctacaagctgaacgtgggcgactacttcgtgctgaccagccacaccgtgatgcccctgagcgcccccaccctggtgccccaggaacactacgtgcggatcaccggcctgtaccccaccctgaacatcagcgacgagttcagctctaacgtcgccaactaccagaaagtgggaatgcagaagtatagcacactgcagggccccccaggcaccggcaagagccacttcgccatcggcctggccctgtactaccccagcgcccggatcgtgtacaccgcctgcagccacgccgccgtggacgccctgtgcgagaaggccctgaagtacctgcccatcgacaagtgcagccggatcattcccgctcgggctcgggtggagtgcttcgacaagttcaaggtgaacagtaccctcgagcagtacgtgttctgcaccgtgaacgccctgcccgaaacaactgccgacatcgtggtgttcgacgagatcagcatggccaccaactacgacctgagcgtggttaacgcccggctgcgggccaagcactacgtgtacatcggcgaccccgcccagctgcccgccccccggaccctgctcaccaagggcaccctggagcccgagtacttcaacagcgtgtgccggctgatgaagaccatcggccccgacatgttcctgggcacctgccggcggtgccccgccgagatcgtggacaccgtgagcgccctggtgtacgacaacaagctgaaggcccacaaggacaagagcgcccagtgcttcaagatgttctacaagggcgtgatcacccacgacgtgagcagcgccatcaaccggccccagatcggcgtggtgcgggagttcctgacccggaaccccgcctggcggaaggccgtgttcatcagcccctacaacagccagaacgccgtggccagcaagatcctgggcctgcccacccagaccgtggacagctctcagggcagcgagtacgactacgtgatcttcacccagaccaccgaaacagcccacagctgcaacgtcaaccgcttcaacgtggccatcacccgggccaaggtgggcatcctgtgcatcatgagcgaccgggacctgtacgacaagctgcagttcaccagcctggagatcccccggaggaacgtggccaccctgcag

SEQ ID NO: 297 - DNA, 2874 bp, synthetic construct
  source 1..2874: mol_type = other DNA
atgggcgtgaccgccccccggaccctgatcctgctcctgagcggcgccctggccctgaccgaaacctgggccggcagcagcgccgacgcccagagcttcctgaaccgggtgtgcggcgtgagcgccgctcggctgaccccttgcggaaccggaaccagtaccgacgtggtctaccgggccttcgacatctacaacgacaaggtggccggcttcgccaagttcctgaagaccaactgctgtcggttccaggagaaggacgaggacgataacctgatcgacagctatttcgtcgtgaagcggcacaccttcagcaactaccagcacgaggaaaccatctacaacctgctcaaggactgccccgccgtggccaagcacgacttctttaagttccggatcgacggcgacatggtgccccacatcagtcggcaacggctgaccaagtacaccatggccgacctcgtgtacgccctgcggcacttcgacgagggcaactgcgacaccctgaaggagatcctggtgacctacaactgctgcgacgacgactatttcaataagaaagattggtacgattttgtggaaaaccctgacatcctgcgggtgtacgccaacctgggcgagcgggtgcggcaggccctcctgaaaaccgtccagttctgcgacgccatgcggaacgccggcatcgtgggcgtgctgaccctggataaccaagacctgaacggcaactggtacgacttcggcgacttcatccagaccacacccggcagcggcgtgcccgtggttgacagctactatagcctgttgatgcccatcctgaccctgacccgggccctgaccgccgagagccacgtggataccgatctgacaaagccctacatcaagtgggacctgctgaagtacgacttcaccgaggagcggctgaagctgttcgaccggtacttcaagtactgggaccagacctaccaccccaactgcgtgaactgcctggacgaccggtgcatcctgcactgcgccaacttcaacgtgctgttcagcaccgtgttcccccctaccagcttcggccccctggtgcggaagattttcgtcgacggcgtgcccttcgtggtgagcaccggctaccacttccgggagctgggcgtggtgcacaaccaggacgtgaacctgcacagctcccggctgagcttcaaggagctgctggtgtacgccgccgaccccgccatgcacgccgcaagcggcaacctgctcctggacaagcggaccacctgcttcagcgtggccgccctgaccaacaacgtggccttccagacagtgaaacccggaaacttcaacaaggacttctacgacttcgccgtgagcaagggcttcttcaaggagggcagcagcgtggagctgaagcacttcttcttcgcccaggacggcaacgctgccattagcgactacgactactaccggtacaacctgcccaccatgtgcgacatccggcagctgttgttcgtggtcgaggtggtggacaagtacttcgactgctacgacggcggctgcatcaacgccaaccaggtgatcgtgaacaacctggacaagagcgccggcttccccttcaacaagtggggcaaggcccggctgtactacgacagcatgagctacgaggaccaggacgccctgttcgcctacaccaagcggaacgtgatccccaccatcacccagatgaacctgaagtacgccatcagcgccaagaaccgggcccggaccgtggccggcgtgagcatctgcagcaccatgaccaaccggcagttccaccagaagctgctcaaaagtatcgccgctacccggggcgccaccgtggttatcggcaccagcaagttctacggcggctggcacaacatgctgaagaccgtgtacagcgacgtggagaacccccacctgatgggctgggactaccccaagtgcgaccgggccatgcccaacatgctgcggatcatggccagcctggtgctggcccgcaagcataccacctgctgcagcctgagccaccggttctaccggctggccaacgagtgcgcccaggtgctgagcgagatggtgatgtgcggcgggagcctgtacgtgaagcccggcggcaccagctctggcgacgccaccaccgcctacgccaacagcgtgttcaacatctgccaggccgtgaccgccaacgtgaacgccctgctcagcaccgacggcaacaagatcgccgacaagtacgtgcggaacctgcagcaccggctgtacgagtgcctgtaccggaaccgggacgtggacaccgacttcgtgaacgagttttacgcctacctgcggaagcacttcagcatgatgatcctgagcgacgacgccgtggtgtgcttcaacagcacctacgccagccagggcctggtggccagcatcaagaacttcaagagcgtgctgtactaccagaacaacgtgttcatgagcgaggccaagtgctggaccgaaacagacctgaccaagggcccccacgagttctgcagccagcacaccatgctggtgaagcagggcgacgattacgtgtacctgccctaccccgaccccagccggatcctgggcgccggctgcttcgtggacgacatcgtgaagaccgacggcaccctgatgatcgagcggttcgtgagcctggccatcgacgcctaccccctgaccaagcaccccaaccaggagtacgccgacgtgttccacctgtacctgcagtacatccggaagctgcacgacgagctgaccggccacatgctggacatgtacagcgtgatgctgaccaacgacaacaccagccggtactgggagcccgagttctacgaggccatgtacaccccccacaccgtgctgcag

SEQ ID NO: 298 - DNA, 327 bp, synthetic construct
  source 1..327: mol_type = other DNA
atgggcgtgaccgccccccggaccctgatcctgctcctgagcggcgccctggccctgaccgaaacctgggccggcagcagcaagatgagcgacgtgaagtgcaccagcgtggtcctgctcagcgtgctgcagcaactgcgggtggagagctccagcaagctgtgggcccagtgcgtccagctccacaacgacatcctgctggccaaggacaccacagaggccttcgagaagatggtgagcctgttgagcgtgctgctgagcatgcagggcgccgtggacatcaacaagctgtgcgaggaaatgctggacaaccgggccaccctgcag

SEQ ID NO: 299 - DNA, 4914 bp, synthetic construct
  source 1..4914: mol_type = other DNA
atgggggccgtgggcgcctgcgtgctgtgtaacagtcagaccagcctgcggtgcggcgcctgcatccgcaggcccttcctgtgctgtaagtgctgctacgaccacgtgattagcacaagccacaagctcgtgctcagcgtgaacccctacgtgtgcaacgcccccggctgcgacgtgacagacgtgacccagctgtacctgggcggaatgagctactattgtaagagtcacaagccccctatcagcttccccctgtgcgccaacggccaggtgttcggcctgtacaagaacacctgcgtgggcagcgacaacgtgaccgacttcaacgccatcgccacctgcgactggaccaacgccggcgactacatcctggccaacacctgcaccgagcggctgaagctgttcgccgctgaaacactgaaggccaccgaggaaaccttcaagctgagctacggcatcgccaccgtgcgggaggtgctcagcgatcgggaactgcacctgagctgggaggtgggcaagccccggcctcctctgaaccggaactacgtgttcaccggctaccgggtgaccaagaacagcaaggtgcagatcggcgagtacaccttcgagaagggcgactacggcgacgccgtggtctaccggggcaccacaacctacaagctgaacgtgggcgactacttcgtgctgaccagccacaccgtgatgcccctgagcgcccccaccctggtgccccaggaacactacgtgcggatcaccggcctgtaccccaccctgaacatcagcgacgagttcagctctaacgtcgccaactaccagaaagtgggaatgcagaagtatagcacactgcagggccccccaggcaccggcaagagccacttcgccatcggcctggccctgtactaccccagcgcccggatcgtgtacaccgcctgcagccacgccgccgtggacgccctgtgcgagaaggccctgaagtacctgcccatcgacaagtgcagccggatcattcccgctcgggctcgggtggagtgcttcgacaagttcaaggtgaacagtaccctcgagcagtacgtgttctgcaccgtgaacgccctgcccgaaacaactgccgacatcgtggtgttcgacgagatcagcatggccaccaactacgacctgagcgtggttaacgcccggctgcgggccaagcactacgtgtacatcggcgaccccgcccagctgcccgccccccggaccctgctcaccaagggcaccctggagcccgagtacttcaacagcgtgtgccggctgatgaagaccatcggccccgacatgttcctgggcacctgccggcggtgccccgccgagatcgtggacaccgtgagcgccctggtgtacgacaacaagctgaaggcccacaaggacaagagcgcccagtgcttcaagatgttctacaagggcgtgatcacccacgacgtgagcagcgccatcaaccggccccagatcggcgtggtgcgggagttcctgacccggaaccccgcctggcggaaggccgtgttcatcagcccctacaacagccagaacgccgtggccagcaagatcctgggcctgcccacccagaccgtggacagctctcagggcagcgagtacgactacgtgatcttcacccagaccaccgaaacagcccacagctgcaacgtcaaccgcttcaacgtggccatcacccgggccaaggtgggcatcctgtgcatcatgagcgaccgggacctgtacgacaagctgcagttcaccagcctggagatcccccggaggaacgtggccaccctgcagggaggagggggctctggtggcggaggaagtagcgccgacgcccagagcttcctgaaccgggtgtgcggcgtgagcgccgctcggctgaccccttgcggaaccggaaccagtaccgacgtggtctaccgggccttcgacatctacaacgacaaggtggccggcttcgccaagttcctgaagaccaactgctgtcggttccaggagaaggacgaggacgataacctgatcgacagctatttcgtcgtgaagcggcacaccttcagcaactaccagcacgaggaaaccatctacaacctgctcaaggactgccccgccgtggccaagcacgacttctttaagttccggatcgacggcgacatggtgccccacatcagtcggcaacggctgaccaagtacaccatggccgacctcgtgtacgccctgcggcacttcgacgagggcaactgcgacaccctgaaggagatcctggtgacctacaactgctgcgacgacgactatttcaataagaaagattggtacgattttgtggaaaaccctgacatcctgcgggtgtacgccaacctgggcgagcgggtgcggcaggccctcctgaaaaccgtccagttctgcgacgccatgcggaacgccggcatcgtgggcgtgctgaccctggataaccaagacctgaacggcaactggtacgacttcggcgacttcatccagaccacacccggcagcggcgtgcccgtggttgacagctactatagcctgttgatgcccatcctgaccctgacccgggccctgaccgccgagagccacgtggataccgatctgacaaagccctacatcaagtgggacctgctgaagtacgacttcaccgaggagcggctgaagctgttcgaccggtacttcaagtactgggaccagacctaccaccccaactgcgtgaactgcctggacgaccggtgcatcctgcactgcgccaacttcaacgtgctgttcagcaccgtgttcccccctaccagcttcggccccctggtgcggaagattttcgtcgacggcgtgcccttcgtggtgagcaccggctaccacttccgggagctgggcgtggtgcacaaccaggacgtgaacctgcacagctcccggctgagcttcaaggagctgctggtgtacgccgccgaccccgccatgcacgccgcaagcggcaacctgctcctggacaagcggaccacctgcttcagcgtggccgccctgaccaacaacgtggccttccagacagtgaaacccggaaacttcaacaaggacttctacgacttcgccgtgagcaagggcttcttcaaggagggcagcagcgtggagctgaagcacttcttcttcgcccaggacggcaacgctgccattagcgactacgactactaccggtacaacctgcccaccatgtgcgacatccggcagctgttgttcgtggtcgaggtggtggacaagtacttcgactgctacgacggcggctgcatcaacgccaaccaggtgatcgtgaacaacctggacaagagcgccggcttccccttcaacaagtggggcaaggcccggctgtactacgacagcatgagctacgaggaccaggacgccctgttcgcctacaccaagcggaacgtgatccccaccatcacccagatgaacctgaagtacgccatcagcgccaagaaccgggcccggaccgtggccggcgtgagcatctgcagcaccatgaccaaccggcagttccaccagaagctgctcaaaagtatcgccgctacccggggcgccaccgtggttatcggcaccagcaagttctacggcggctggcacaacatgctgaagaccgtgtacagcgacgtggagaacccccacctgatgggctgggactaccccaagtgcgaccgggccatgcccaacatgctgcggatcatggccagcctggtgctggcccgcaagcataccacctgctgcagcctgagccaccggttctaccggctggccaacgagtgcgcccaggtgctgagcgagatggtgatgtgcggcgggagcctgtacgtgaagcccggcggcaccagctctggcgacgccaccaccgcctacgccaacagcgtgttcaacatctgccaggccgtgaccgccaacgtgaacgccctgctcagcaccgacggcaacaagatcgccgacaagtacgtgcggaacctgcagcaccggctgtacgagtgcctgtaccggaaccgggacgtggacaccgacttcgtgaacgagttttacgcctacctgcggaagcacttcagcatgatgatcctgagcgacgacgccgtggtgtgcttcaacagcacctacgccagccagggcctggtggccagcatcaagaacttcaagagcgtgctgtactaccagaacaacgtgttcatgagcgaggccaagtgctggaccgaaacagacctgaccaagggcccccacgagttctgcagccagcacaccatgctggtgaagcagggcgacgattacgtgtacctgccctaccccgaccccagccggatcctgggcgccggctgcttcgtggacgacatcgtgaagaccgacggcaccctgatgatcgagcggttcgtgagcctggccatcgacgcctaccccctgaccaagcaccccaaccaggagtacgccgacgtgttccacctgtacctgcagtacatccggaagctgcacgacgagctgaccggccacatgctggacatgtacagcgtgatgctgaccaacgacaacaccagccggtactgggagcccgagttctacgaggccatgtacaccccccacaccgtgctgcagggaggagggggctctggtggcggaggaagtagcaagatgagcgacgtgaagtgcaccagcgtggtcctgctcagcgtgctgcagcaactgcgggtggagagctccagcaagctgtgggcccagtgcgtccagctccacaacgacatcctgctggccaaggacaccacagaggccttcgagaagatggtgagcctgttgagcgtgctgctgagcatgcagggcgccgtggacatcaacaagctgtgcgaggaaatgctggacaaccgggccaccctgcag

SEQ ID NO: 300 - DNA, 4938 bp, synthetic construct
  source 1..4938: mol_type = other DNA
atgggggccgtgggcgcctgcgtgctgtgtaacagtcagaccagcctgcggtgcggcgcctgcatccgcaggcccttcctgtgctgtaagtgctgctacgaccacgtgattagcacaagccacaagctcgtgctcagcgtgaacccctacgtgtgcaacgcccccggctgcgacgtgacagacgtgacccagctgtacctgggcggaatgagctactattgtaagagtcacaagccccctatcagcttccccctgtgcgccaacggccaggtgttcggcctgtacaagaacacctgcgtgggcagcgacaacgtgaccgacttcaacgccatcgccacctgcgactggaccaacgccggcgactacatcctggccaacacctgcaccgagcggctgaagctgttcgccgctgaaacactgaaggccaccgaggaaaccttcaagctgagctacggcatcgccaccgtgcgggaggtgctcagcgatcgggaactgcacctgagctgggaggtgggcaagccccggcctcctctgaaccggaactacgtgttcaccggctaccgggtgaccaagaacagcaaggtgcagatcggcgagtacaccttcgagaagggcgactacggcgacgccgtggtctaccggggcaccacaacctacaagctgaacgtgggcgactacttcgtgctgaccagccacaccgtgatgcccctgagcgcccccaccctggtgccccaggaacactacgtgcggatcaccggcctgtaccccaccctgaacatcagcgacgagttcagctctaacgtcgccaactaccagaaagtgggaatgcagaagtatagcacactgcagggccccccaggcaccggcaagagccacttcgccatcggcctggccctgtactaccccagcgcccggatcgtgtacaccgcctgcagccacgccgccgtggacgccctgtgcgagaaggccctgaagtacctgcccatcgacaagtgcagccggatcattcccgctcgggctcgggtggagtgcttcgacaagttcaaggtgaacagtaccctcgagcagtacgtgttctgcaccgtgaacgccctgcccgaaacaactgccgacatcgtggtgttcgacgagatcagcatggccaccaactacgacctgagcgtggttaacgcccggctgcgggccaagcactacgtgtacatcggcgaccccgcccagctgcccgccccccggaccctgctcaccaagggcaccctggagcccgagtacttcaacagcgtgtgccggctgatgaagaccatcggccccgacatgttcctgggcacctgccggcggtgccccgccgagatcgtggacaccgtgagcgccctggtgtacgacaacaagctgaaggcccacaaggacaagagcgcccagtgcttcaagatgttctacaagggcgtgatcacccacgacgtgagcagcgccatcaaccggccccagatcggcgtggtgcgggagttcctgacccggaaccccgcctggcggaaggccgtgttcatcagcccctacaacagccagaacgccgtggccagcaagatcctgggcctgcccacccagaccgtggacagctctcagggcagcgagtacgactacgtgatcttcacccagaccaccgaaacagcccacagctgcaacgtcaaccgcttcaacgtggccatcacccgggccaaggtgggcatcctgtgcatcatgagcgaccgggacctgtacgacaagctgcagttcaccagcctggagatcccccggaggaacgtggccaccctgcagggaggagggggcagatctaagagatctggtggcggaggaagtagcgccgacgcccagagcttcctgaaccgggtgtgcggcgtgagcgccgctcggctgaccccttgcggaaccggaaccagtaccgacgtggtctaccgggccttcgacatctacaacgacaaggtggccggcttcgccaagttcctgaagaccaactgctgtcggttccaggagaaggacgaggacgataacctgatcgacagctatttcgtcgtgaagcggcacaccttcagcaactaccagcacgaggaaaccatctacaacctgctcaaggactgccccgccgtggccaagcacgacttctttaagttccggatcgacggcgacatggtgccccacatcagtcggcaacggctgaccaagtacaccatggccgacctcgtgtacgccctgcggcacttcgacgagggcaactgcgacaccctgaaggagatcctggtgacctacaactgctgcgacgacgactatttcaataagaaagattggtacgattttgtggaaaaccctgacatcctgcgggtgtacgccaacctgggcgagcgggtgcggcaggccctcctgaaaaccgtccagttctgcgacgccatgcggaacgccggcatcgtgggcgtgctgaccctggataaccaagacctgaacggcaactggtacgacttcggcgacttcatccagaccacacccggcagcggcgtgcccgtggttgacagctactatagcctgttgatgcccatcctgaccctgacccgggccctgaccgccgagagccacgtggataccgatctgacaaagccctacatcaagtgggacctgctgaagtacgacttcaccgaggagcggctgaagctgttcgaccggtacttcaagtactgggaccagacctaccaccccaactgcgtgaactgcctggacgaccggtgcatcctgcactgcgccaacttcaacgtgctgttcagcaccgtgttcccccctaccagcttcggccccctggtgcggaagattttcgtcgacggcgtgcccttcgtggtgagcaccggctaccacttccgggagctgggcgtggtgcacaaccaggacgtgaacctgcacagctcccggctgagcttcaaggagctgctggtgtacgccgccgaccccgccatgcacgccgcaagcggcaacctgctcctggacaagcggaccacctgcttcagcgtggccgccctgaccaacaacgtggccttccagacagtgaaacccggaaacttcaacaaggacttctacgacttcgccgtgagcaagggcttcttcaaggagggcagcagcgtggagctgaagcacttcttcttcgcccaggacggcaacgctgccattagcgactacgactactaccggtacaacctgcccaccatgtgcgacatccggcagctgttgttcgtggtcgaggtggtggacaagtacttcgactgctacgacggcggctgcatcaacgccaaccaggtgatcgtgaacaacctggacaagagcgccggcttccccttcaacaagtggggcaaggcccggctgtactacgacagcatgagctacgaggaccaggacgccctgttcgcctacaccaagcggaacgtgatccccaccatcacccagatgaacctgaagtacgccatcagcgccaagaaccgggcccggaccgtggccggcgtgagcatctgcagcaccatgaccaaccggcagttccaccagaagctgctcaaaagtatcgccgctacccggggcgccaccgtggttatcggcaccagcaagttctacggcggctggcacaacatgctgaagaccgtgtacagcgacgtggagaacccccacctgatgggctgggactaccccaagtgcgaccgggccatgcccaacatgctgcggatcatggccagcctggtgctggcccgcaagcataccacctgctgcagcctgagccaccggttctaccggctggccaacgagtgcgcccaggtgctgagcgagatggtgatgtgcggcgggagcctgtacgtgaagcccggcggcaccagctctggcgacgccaccaccgcctacgccaacagcgtgttcaacatctgccaggccgtgaccgccaacgtgaacgccctgctcagcaccgacggcaacaagatcgccgacaagtacgtgcggaacctgcagcaccggctgtacgagtgcctgtaccggaaccgggacgtggacaccgacttcgtgaacgagttttacgcctacctgcggaagcacttcagcatgatgatcctgagcgacgacgccgtggtgtgcttcaacagcacctacgccagccagggcctggtggccagcatcaagaacttcaagagcgtgctgtactaccagaacaacgtgttcatgagcgaggccaagtgctggaccgaaacagacctgaccaagggcccccacgagttctgcagccagcacaccatgctggtgaagcagggcgacgattacgtgtacctgccctaccccgaccccagccggatcctgggcgccggctgcttcgtggacgacatcgtgaagaccgacggcaccctgatgatcgagcggttcgtgagcctggccatcgacgcctaccccctgaccaagcaccccaaccaggagtacgccgacgtgttccacctgtacctgcagtacatccggaagctgcacgacgagctgaccggccacatgctggacatgtacagcgtgatgctgaccaacgacaacaccagccggtactgggagcccgagttctacgaggccatgtacaccccccacaccgtgctgcagggaggagggggcagatctaagagatctggtggcggaggaagtagcaagatgagcgacgtgaagtgcaccagcgtggtcctgctcagcgtgctgcagcaactgcgggtggagagctccagcaagctgtgggcccagtgcgtccagctccacaacgacatcctgctggccaaggacaccacagaggccttcgagaagatggtgagcctgttgagcgtgctgctgagcatgcagggcgccgtggacatcaacaagctgtgcgaggaaatgctggacaaccgggccaccctgcag

SEQ ID NO: 301 - protein, 268 aa, synthetic construct; identical to SEQ ID NO: 98

SEQ ID NO: 302 - protein, 1273 aa, Severe acute respiratory syndrome coronavirus 2; identical to SEQ ID NO: 53

SEQ ID NO: 303 - DNA, 804 bp, synthetic construct
  source 1..804: mol_type = other DNA
atgggagtcaaagttctgtttgccctgatctgcattgctgtggccgaggccaagagagtccaaccaacagaatctattgttagatttcctaatattacaaacttgtgcccttttggtgaagtttttaacgccaccagatttgcatccgtgtatgcttggaacaggaagagaatcagcaactgtgttgctgattattctgtcctatataattccgcatcattttccacttttaagtgttatggagtgtctcctactaaattaaatgatctctgctttactaatgtctatgcagattcatttgtaattagaggtgatgaagtcagacaaatcgctccagggcaaactggaaagattgctgattataattataaattaccagatgattttacaggctgcgttatagcttggaattctaacaatcttgattctaaggttggtggtaattataattacctgtatagattgtttaggaagtctaatctcaaaccttttgagagagatatttcaactgaaatctatcaggccggtagcacaccttgtaatggtgttgaaggttttaattgttactttcctttacaatcatatggtttccaacccactaatggtgttggttaccaaccatacagagtagtagtactttcttttgaacttctacatgcaccagcaactgtttgtggacctaaaaagtctactaatttggttaaaaacaaatgtgtcaatttcgggtatatccctgaagcccccagggacggccaggcttacgtcagaaaggatggagagtgggtgctcttgagcaccttcctg

SEQ ID NO: 304 - DNA, 3819 bp, synthetic construct; identical to SEQ ID NO: 237
  source 1..3819: mol_type = other DNA

SEQ ID NO: 305 - DNA, 741 bp, synthetic construct
  source 1..741: mol_type = other DNA
ttaaaacagcctgtgggttgatcccacccacaggcccattgggcgctagcactctggtatcacggtacctttgtgcgcctgttttataccccctcccccaactgtaacttagaagtaacacacaccgatcaacagtcagcgtggcacaccagccacgttttgatcaagcacttctgttaccccggactgagtatcaatagactgctcacgcggttgaaggagaaagcgttcgttatccggccaactacttcgaaaaacctagtaacaccgtggaagttgcagagtgtttcgctcagcactaccccagtgtagatcaggtcgatgagtcaccgcattccccacgggcgaccgtggcggtggctgcgttggcggcctgcccatggggaaacccatgggacgctctaatacagacatggtgcgaagagtctattgagctagttggtagtcctccggcccctgaatgcggctaatcctaactgcggagcacacaccctcaagccagagggcagtgtgtcgtaacgggcaactctgcagcggaaccgactactttgggtgtccgtgtttcattttattcctatactggctgcttatggtgacaattgagagatcgttaccatatagctattggattggccatccggtgactaatagagctattatatatccctttgttgggtttataccacttagcttgaaagaggttaaaacattacaattcattgttaagttgaatacagcaac

SEQ ID NO: 306 - DNA, 749 bp, synthetic construct
  source 1..749: mol_type = other DNA
ttaaaacagctgtgggttgtcacccacccacagggtccactgggcgctagtacactggtatctcggtacctttgtacgcctgttttataccccctccctgatttgcaacttagaagcaacgcaaaccagatcaatagtaggtgtgacataccagtcgcatcttgatcaagcacttctgtatccccggaccgagtatcaatagactgtgcacacggttgaaggagaaaacgtccgttacccggctaactacttcgagaagcctagtaacgccattgaagttgcagagtgtttcgctcagcactccccccgtgtagatcaggtcgatgagtcaccgcattccccacgggcgaccgtggcggtggctgcgttggcggcctgcctatggggtaacccataggacgctctaatacggacatggcgtgaagagtctattgagctagttagtagtcctccggcccctgaatgcggctaatcctaactgcggagcacatacccttaatccaaagggcagtgtgtcgtaacgggcaactctgcagcggaaccgactactttgggtgtccgtgtttctttttattcttgtattggctgcttatggtgacaattaaagaattgttaccatatagctattggattggccatccagtgtcaaacagagctattgtatatctctttgttggattcacacctctcactcttgaaacgttacacaccctcaattacattatactgctgaacacgaagcggccacc

SEQ ID NO: 307 - DNA, 131 bp, synthetic construct
  source 1..131: mol_type = other DNA
aacaacagataacttacagctagtcggaaggtgcagagactcgacgggagctaccctaacgtcaagacgagggtaaagagagagtccaattctcaaagccaataggcagtagcgaaagctgcgggagaatg

SEQ ID NO: 308 - DNA, 118 bp, synthetic construct
  source 1..118: mol_type = other DNA
aaataattgagccttagagaagaaattctttaagtggatgctctcaaactcagggaaacctaaatctagctatagacaaggcaatcctgagccaagccgaagtagtaattagtaagtt

SEQ ID NO: 309 - DNA, 178 bp, synthetic construct
  source 1..178: mol_type = other DNA
cttctgttgatatggatgcagttcacagactaaatgtcggtcggggaagatgtattcttctcataagatatagtcggacctctccttaatgggagctagcggatgaagtgatgcaacactggagccgctgggaactaatttgtatgcgaaagtatattgattagttttggagtactcg

SEQ ID NO: 310 - DNA, 235 bp, synthetic construct
  source 1..235: mol_type = other DNA
aaatagcaatatttacctttggagggaaaagttatcaggcatgcacctggtagctagtctttaaaccaatagattgcatcggtttaaaaggcaagaccgtcaaattgcgggaaaggggtcaacagccgttcagtaccaagtctcaggggaaactttgagatggccttgcaaagggtatggtaataagctgacggacatggtcctaaccacgcagccaagtcctaagtcaacagat

SEQ ID NO: 311 - DNA, 167 bp, synthetic construct
  source 1..167: mol_type = other DNA
ggttctacataaatgcctaacgactatccctttggggagtagggtcaagtgactcgaaacgatagacaacttgctttaacaagttggagatatagtctgctctgcatggtgacatgcagctggatataattccggggtaagattaacgaccttatctgaacataatg

SEQ ID NO: 312 - DNA, 93 bp, synthetic construct
  source 1..93: mol_type = other DNA
taattgaggcctgagtataaggtgacttatacttgtaatctatctaaacggggaacctctctagtagacaatcccgtgctaaattgtaggact

SEQ ID NO: 313 - DNA, 182 bp, synthetic construct
  source 1..182: mol_type = other DNA
taaacaactaacagctttagaaggtgcagagactagacgggagctaccctaacggattcagccgagggtaaagggatagtccaattctcaacatcgcgattgttgatggcagcgaaagttgcagagagaatgaaaatccgctgactgtaaaggtcgtgagggttcgagtccctccgccccca

SEQ ID NO: 314 - DNA, 128 bp, synthetic construct
  source 1..128: mol_type = other DNA
acggtagacgcagcggacttagaaaactgggcctcgatcgcgaaagggatcgagtggcagctctcaaactcagggaaacctaaaactttaaacattmaagtcatggcaatcctgagccaagctaaagc

SEQ ID NO: 315 - DNA, 210 bp, synthetic construct
  source 1..210: mol_type = other DNA
ttaaactcaaaatttaaaatcccaaattcaaaattccgggaaggtgcagagactcgacgggagctaccctaacgtaaagccgagggtaaagggagagtccaattctcaaagcctgaagttgctgaagcaacaaggcagtagtgaaagctgcgagagaatgaaaatccgttgactgtaaaaagtcgtgggggttcaagtccccccaccccc

SEQ ID NO: 316 - DNA, 151 bp, synthetic construct
  source 1..151: mol_type = other DNA
atggtagacgctacggacttagaaaactgagccttgatagagaaatcttttaagtggaagctctcaaattcagggaaacctaaatctgaatacagatatggcaatcctgagccaagcccagaaaatttagacttgagatttgattttggag

SEQ ID NO: 317 - DNA, 207 bp, synthetic construct
  source 1..207: mol_type = other DNA
ggctttcaatttgaaatcagaaattcaaaattcagggaaggtgcagagactcgacgggagctaccctaacgtaaaggcgagggtaaagggagagtccaattcttaaagcctgaagttgtgcaagcaacaaggcaacagtgaaagctgtggaagaatgaaaatccgttgaccttaaacggtcgtgggggttcaagtccccccaccccc

SEQ ID NO: 318 - DNA, 147 bp, synthetic construct
  source 1..147: mol_type = other DNA
atggtagacgctacggacttagaaaactgagccttgatagagaaatctttcaagtggaagctctcaaattcagggaaacctaaatctgaatacagatatggcaatcctgagccaagcccggaaattttagaatcaagattttatttt

SEQ ID NO: 319 - DNA, 178 bp, synthetic construct
  source 1..178: mol_type = other DNA
agaaatggagaaggtgtagagactggaaggcaggcaccctaacgttaaaggcgagggtgaagggacagtccagaccacaaaccagtaaatctgggcagcgaaagctgtagatggtaagcataacccgaaggtcagtggttcaaatccacttcccgccaccaaattaaaaaaacaataa

SEQ ID NO: 320 - DNA, 178 bp, synthetic construct; identical to SEQ ID NO: 319
  source 1..178: mol_type = other DNA

SEQ ID NO: 321 - DNA, 189 bp, synthetic construct
  source 1..189: mol_type = other DNA
acaacagataacttactaacttacagctagtcggaaggtgcagagactcgacgggagctaccctaacgtcaagacgagggtaaagagagagtccaattctcaaagccaataggcagtagcgaaagctgcgggagaatgaaaatccgtagcgtctaaacggtcgtgtgggttcaagtccctccaccccca

SEQ ID NO: 322 - DNA, 141 bp, synthetic construct
  source 1..141: mol_type = other DNA
agacgctacggacttaaataattgagccttagagaagaaattctttaagtggatgctctcaaactcagggaaacctaaatctagctatagacaaggcaatcctgagccaagccgaagtagtaattagtaagttagtaagtt

SEQ ID NO: 323 - DNA, 186 bp, synthetic construct
  source 1..186: mol_type = other DNA
aacaacagataacttactagttactagtcggaaggtgcagagactcgacgggagctaccctaacgtcaagacgagggtaaagagagagtccaattctcaaagccaataggcagtagcgaaagctgcgggagaatgaaaatccgtagcgtctaaacggtcgtgtgggttcaagtccctccaccccca

SEQ ID NO: 324 - DNA, 133 bp, synthetic construct
  source 1..133: mol_type = other DNA
agacgctacggacttaaataattgagccttagagaagaaattctttaagtggatgctctcaaactcagggaaacctaaatctagctatagacaaggcaatcctgagccaagccgaagtagtaattagtaagtt

SEQ ID NO: 325 - protein, 154 aa, synthetic construct
MQIYEGKLTAEGLRFGIVASRFNHALVDRLVEGAIDCIVRHGGREEDITLVRVPGSWEIPVAAGELARKEDIDAVIAIGVLIRGATPHFDYIASEVSKGLANLSLELRKPITFGVITADTLEQAIERAGTKHGNKGWEAALSAIEMANLFKSLR

SEQ ID NO: 326 - protein, 28 aa, synthetic construct
TDILGKYVINYLNKLKKKEDIFKEFLKW

SEQ ID NO: 327 - protein, 10 aa, Human immunodeficiency virus 1
TPKKIKPPLP

SEQ ID NO: 328 - protein, 154 aa, synthetic construct
MQIYEGKLTAEGLRFGIVASRFNHALVDRLVEGAIDAIVRHGGREEDITLVRVPGSWEIPVAAGELARKEDIDAVIAIGVLIRGATPHFDYIASEVSKGLADLSLELRKPITFGVITADTLEQAIERAGTKHGNKGWEAALSAIEMANLFKSLR

SEQ ID NO: 329 - protein, 153 aa, synthetic construct
QIYEGKLTAEGLRFGIVASRFNHALVDRLVEGCIDCIVRHGGREEDITLVRVPGSWEIPVAAGELARKEDIDAVIAIGVLIRGATPHFDYIASEVSKGLANLSLELRKPITFGVITADTLEQAIERAGTKHGNKCWEAALSAIEMANLFKSLR

SEQ ID NO: 330 - RNA, 10 nt, synthetic construct
  source 1..10: mol_type = other RNA
aaaaaaaaaa

SEQ ID NO: 331 - RNA, 15 nt, synthetic construct
  source 1..15: mol_type = other RNA
aaaaaaaaaaaaaaa

SEQ ID NO: 332 - RNA, 20 nt, synthetic construct
  source 1..20: mol_type = other RNA
aaaaaaaaaaaaaaaaaaaa

SEQ ID NO: 333 - RNA, 30 nt, synthetic construct
  source 1..30: mol_type = other RNA
aaaaaaaaaaaaaaaaaaaaaaaaaaaaaa

SEQ ID NO: 334 - RNA, 40 nt, synthetic construct
  source 1..40: mol_type = other RNA
aaaaaaaaaaaaaaaaaaaaaaaaaaaaaaaaaaaaaaaa

SEQ ID NO: 335 - RNA, 50 nt, synthetic construct
  source 1..50: mol_type = other RNA
aaaaaaaaaaaaaaaaaaaaaaaaaaaaaaaaaaaaaaaaaaaaaaaaaa

SEQ ID NO: 336 - protein, 4 aa, synthetic construct
GSAS
